(19) United States
(12) Patent Application Publication
(10) Pub. No.: US 2024/0327472 A1
(43) Pub. Date: Oct. 3, 2024

(54) MODIFIED CLOSTRIDIAL NEUROTOXINS

(71) Applicant: IPSEN BIOPHARM LIMITED, Wrexham (GB)

(72) Inventors: Kevin MOORE, Wrexham (GB); Andrew SPLEVINS, SR., Wrexham (GB); Teresa BARATA, Wrexham (GB); Daniel HIGAZI, Wrexham (GB); David SPENCER, Wrexham (GB)

(21) Appl. No.: 18/549,871

(22) PCT Filed: Mar. 11, 2022
(86) PCT No.: PCT/GB2022/050641

§ 371 Date: Sep. 8, 2023

(30) Foreign Application Priority Data
Mar. 11, 2021 (GB) 2103372.5

(51) Int. Cl. C07K 14/33; A61K 8/66; A61K 38/00; C12N 9/52

(52) U.S. Cl. CPC C07K 14/33; A61K 8/66; C12N 9/52; A61K 38/00; C12Y 304/24069

(57) ABSTRACT

The present invention is directed to a modified clostridial neurotoxin comprising a botulinum neurotoxin A (BoNT/A) H_{cc} domain, wherein the H_{cc} domain comprises a modification of methionine 1144 (MI 144), and wherein the modification increases oxidative resistance of the modified clostridial neurotoxin when compared to an otherwise identical clostridial neurotoxin lacking the modification. Also provided are (inter alia) corresponding methods for producing the same, methods for selecting oxidation resistant clostridial neurotoxins, nucleic acids encoding the same, and therapeutic uses of said modified clostridial neurotoxins.

### FIELD OF THE INVENTION

[0001] The present invention relates to modified clostridial neurotoxins, in particular, modified clostridial neurotoxins having increased oxidative resistance.

### BACKGROUND

[0002] Bacteria in the genus Clostridia produce highly potent and specific protein toxins, which can poison neurons and other cells to which they are delivered. Examples of such clostridial neurotoxins include the neurotoxins produced by C. tetani (TeNT) and by C. botulinum (BoNT) serotypes A-G, and X (see WO 2018/009903 A2), as well as those produced by C. baratii and C. butyricum.

[0003] The clostridial neurotoxins are among some of the most potent toxins known. For example, botulinum neurotoxins have median lethal dose (LD₅₀) values for mice ranging from 0.5 to 5 ng/kg, depending on the serotype. Both tetanus and botulinum neurotoxins act by inhibiting the function of affected neurons, specifically the release of neurotransmitters. While botulinum toxin acts at the neuromuscular junction and inhibits cholinergic transmission in the peripheral nervous system, tetanus toxin acts in the central nervous system.

[0004] In nature, clostridial neurotoxins are synthesised as a single-chain polypeptide that is modified post-translationally by a proteolytic cleavage event to form two polypeptide chains joined together by a disulphide bond. Cleavage occurs at a specific cleavage site, often referred to as the activation site, that is located between the cysteine residues that provide the inter-chain disulphide bond. It is this di-chain form that is the active form of the toxin. The two chains are termed the heavy chain (H-chain), which has a molecular mass of approximately 100 kDa, and the light chain (L-chain), which has a molecular mass of approximately 50 kDa. The H-chain comprises an N-terminal translocation component (H_{N} domain) and a C-terminal targeting component (Hc domain). The cleavage site is located between the L-chain and the translocation domain components. Following binding of the He domain to its target neuron and internalisation of the bound toxin into the cell via an endosome, the H_{N} domain translocates the L-chain across the endosomal membrane and into the cytosol, and the L-chain provides a protease function (also known as a non-cytotoxic protease).

[0005] Non-cytotoxic proteases act by proteolytically cleaving intracellular transport proteins known as SNARE proteins (e.g. SNAP-25, VAMP, or Syntaxin)—see Gerald K (2002) “Cell and Molecular Biology” (4th edition) John Wiley & Sons, Inc. The acronym SNARE derives from the term Soluble NSF Attachment Receptor, where NSF means N-ethylmaleimide-Sensitive Factor. SNARE proteins are integral to intracellular vesicle fusion, and thus to secretion of molecules via vesicle transport from a cell. The protease function is a zinc-dependent endopeptidase activity and exhibits a high substrate specificity for SNARE proteins. Accordingly, once delivered to a desired target cell, the non-cytotoxic protease is capable of inhibiting cellular secretion from the target cell. The L-chain proteases of clostridial neurotoxins are non-cytotoxic proteases that cleave SNARE proteins.

[0006] In view of the ubiquitous nature of SNARE proteins, clostridial neurotoxins such as botulinum neurotoxin have been successfully employed in a wide range of therapies.

[0007] For example, William J. Lipham, Cosmetic and Clinical Applications of Botulinum Toxin (Slack, Inc., 2004) describes the use of clostridial neurotoxins, such as botulinum neurotoxins (BoNTs), BoNT/A, BoNT/B, BoNT/C₁, BoNT/D, BoNT/E, BoNT/F and BoNT/G, and tetanus neurotoxin (TeNT), to inhibit neuronal transmission in a wide variety of therapeutic and cosmetic applications—as an example, BOTOX™ is currently approved as a therapeutic for the following indications: achalasia, adult spasticity, anal fissure, back pain, blepharospasm, bruxism, cervical dystonia, essential tremor, glabellar lines or hyperkinetic facial lines, headache, hemifacial spasm, hyperactivity of bladder, hyperhidrosis, juvenile cerebral palsy, multiple sclerosis, myoclonic disorders, nasal labial lines, spasmodic dysphonia, strabismus and VII nerve disorder. In addition, clostridial neurotoxin therapies are described for treating neuromuscular disorders (see U.S. Pat. No. 6,872,397); for treating uterine disorders (see US 2004/0175399); for treating ulcers and gastroesophageal reflux disease (see US 2004/0086531); for treating dystonia (see U.S. Pat. No. 6,319,505); for treating eye disorders (see US 2004/0234532); for treating blepharospasm (see US 2004/0151740); for treating strabismus (see US 2004/0126396); for treating pain (see U.S. Pat. Nos. 6,869,610, 6,641,820, 6,464,986, and 6,113,915); for treating fibromyalgia (see U.S. Pat. No. 6,623,742, US 2004/0062776); for treating lower back pain (see US 2004/0037852); for treating muscle injuries (see U.S. Pat. No. 6,423,319); for treating sinus headache (see U.S. Pat. No. 6,838,434); for treating tension headache (see U.S. Pat. No. 6,776,992); for treating headache (see U.S. Pat. No. 6,458,365); for reduction of migraine headache pain (see U.S. Pat. No. 5,714,469); for treating cardiovascular diseases (see U.S. Pat. No. 6,767,544); for treating neurological disorders such as Parkinson's disease (see U.S. Pat. Nos. 6,620,415, 6,306,403); for treating neuropsychiatric disorders (see US 2004/0180061, US 2003/0211121); for treating endocrine disorders (see U.S. Pat. No. 6,827,931); for treating thyroid disorders (see U.S. Pat. No. 6,740,321); for treating cholinergic influenced sweat gland disorders (see U.S. Pat. No. 6,683,049); for treating diabetes (see U.S. Pat. Nos. 6,337,075, 6,416,765); for treating a pancreatic disorder (see U.S. Pat. Nos. 6,261,572, 6,143,306); for treating cancers such as bone tumors (see U.S. Pat. Nos. 6,565,870, 6,368,605, 6,139,845, US 2005/0031648); for treating otic disorders (see U.S. Pat. Nos. 6,358,926, 6,265,379); for treating autonomic disorders such as gastrointestinal muscle disorders and other smooth muscle dysfunction (see U.S. Pat. No. 5,437,291); for treatment of skin lesions associated with cutaneous cell-proliferative disorders (see U.S. Pat. No. 5,670,484); for management of neurogenic inflammatory disorders (see U.S. Pat. No. 6,063,768); for reducing hair loss and stimulating hair growth (see U.S. Pat. No. 6,299,893); for treating downturned mouth (see U.S. Pat. No. 6,358,917); for reducing appetite (see US 2004/40253274); for dental therapies and procedures (see US 2004/0115139); for treating neuromuscular disorders and conditions (see US 2002/0010138); for treating various disorders and conditions and associated pain (see US 2004/0013692); for treating conditions resulting from mucus hypersecretion such as asthma and COPD (see WO 00/10598); and for treating non-neuronal conditions such as inflammation, endocrine conditions, exocrine conditions, immunological conditions, cardiovascular conditions, bone conditions (see WO 01/21213). All of the above publications are hereby incorporated by reference in their entirety.

[0008] The use of non-cytotoxic proteases such as clostridial neurotoxins (e.g. BoNTs and TeNT) in therapeutic and cosmetic treatments of humans and other mammals is anticipated to expand to an ever-widening range of diseases and ailments that can benefit from the properties of these toxins. In view of this, there is an increasing demand for large-scale manufacture of clostridial neurotoxins.

[0009] The large-scale manufacture of biotherapeutics, and clostridial neurotoxins in particular, is challenging, with the possibility for unwanted polypeptide modification and/or degradation at multiple stages of the process. One such unwanted modification is oxidation, which can occur during cellular expression of a clostridial neurotoxin, purification, bioprocessing, formulation, and/or storage. Indeed, oxidation is one of the principal degradation pathways for biotherapeutics. Oxidizing agents such as peroxides, dissolved oxygen, metal ions, light and free-radicals can catalyse oxidation of amino acids, such as methionine, cysteine, histidine, tryptophan, tyrosine, and phenylalanine (Torosantucci et al (2014), Pharm Res, 31, 541-553). In bioprocessing and formulation, metal catalysts may come from metal contaminated buffers and/or metal contact surfaces, with the metal-catalysed oxidation of histidine and methionine residues having been demonstrated to cause loss of activity, for example due to aggregation and/or precipitation of oxidized polypeptides. Moreover, oxidizing agents are typically employed for decontamination in large-scale manufacture. Clostridial neurotoxins are large polypeptides having many surface exposed amino acid residues that are candidates for oxidation.

[0010] For at least the reasons provided above, there is a need for a robust clostridial neurotoxin that is resistant to oxidation, thereby minimising unwanted modification and/or degradation during large-scale manufacture and/or storage. Moreover, such a clostridial neurotoxin could exhibit improved stabilisation at room temperature, e.g. as part of a liquid or lyophilised formulation. Advantageously, this would remove the need for maintenance of low temperatures during manufacture.

[0011] The present invention overcomes one or more of the above-mentioned problems and/or provides one or more of the advantages detailed above.

### SUMMARY OF THE INVENTION

[0012] The present inventors have found oxidation at methionine 1144 (M1144) of botulinum neurotoxin A (BoNT/A) to be a principal cause of oxidation-dependent activity loss. Advantageously, by modifying M1144 to prevent its oxidation (e.g. via substitution with an oxidation resistant amino acid residue and/or deletion of M1144), the inventors have found that oxidation-dependent activity loss can be minimised/avoided. Surprisingly, modification of M1144 not only minimises/avoids oxidation-dependent activity loss but may, in fact, increase activity of the resultant modified neurotoxin.

[0013] M1144 is an amino acid present in the C-terminal portion of the He domain of BoNT/A (Hec domain) and is involved in binding of BoNT/A to synaptic vesicle glycoprotein (SV2) on target neuronal cells. Given that this residue is involved in SV2 binding, it is believed that any clostridial neurotoxin comprising a BoNT/A H_{cc} domain suitably modified at M1144 will exhibit the improved properties described herein.

### DETAILED DESCRIPTION

[0014] In one aspect, the invention provides a modified clostridial neurotoxin comprising a botulinum neurotoxin A (BoNT/A) H_{cc} domain, wherein the H_{cc} domain comprises a modification of methionine 1144 (M1144), and wherein the modification increases oxidative resistance of the modified clostridial neurotoxin when compared to an otherwise identical clostridial neurotoxin lacking the modification.

[0015] The term “modified clostridial neurotoxin” as used herein refers to a clostridial neurotoxin that does not exist in nature and that comprises a modification of methionine 1144 (M1144), wherein the modification increases oxidative resistance of the modified clostridial neurotoxin when compared to an otherwise identical clostridial neurotoxin lacking the modification. Thus, the term “modified clostridial neurotoxin” excludes a natural variant clostridial neurotoxin that comprises botulinum neurotoxin A (BoNT/A) H_{cc} domain, wherein the H_{cc} domain comprises an amino acid that is resistant to oxidation at amino acid 1144.

[0016] A modified clostridial neurotoxin may be a single-chain modified clostridial neurotoxin or a di-chain modified clostridial toxin. Preferably, a modified clostridial neurotoxin is a di-chain modified clostridial toxin comprising a light chain and a heavy chain joined together by a disulphide bond.

[0017] A modified clostridial neurotoxin of the invention binds to a clostridial neurotoxin target cell, specifically at least a BoNT/A target cell. Said modified clostridial neurotoxin binds to SV2 (e.g. SV2c). In one embodiment, a modified clostridial neurotoxin of the invention binds to SV2 with a higher affinity than an otherwise identical clostridial neurotoxin lacking a claimed modification. In particular, as shown herein, a modified clostridial neurotoxin comprising a M1144V or M1144L substitution binds to SV2 with a higher affinity than an otherwise identical clostridial neurotoxin lacking a claimed modification. A higher affinity may be expressed as a lower K_{D} value (preferably a statistically-significantly lower value) when compared to that of an otherwise identical clostridial neurotoxin lacking a claimed modification. A K_{D} value is preferably determined using an assay described in Example 6 herein.

[0018] A modified clostridial neurotoxin of the invention preferably exhibits improved activity (e.g. statistically-significantly improved activity) when compared with an otherwise identical clostridial neurotoxin lacking a claimed modification.

[0019] The amino acid position numbering referred to herein is defined by alignment with SEQ ID NO: 2. For example, a position presented as 1144 may not be amino acid number 1144 of a given polypeptide, but instead is the methionine residue that corresponds to M1144 of SEQ ID NO: 2 when said polypeptide is aligned with SEQ ID NO: 2. SEQ ID NO: 2 is an unmodified BoNT/A1 polypeptide sequence that exists in nature. As an example, M1140 of BoNT/A3 corresponds to M1144 of BoNT/A1. Thus, modification of M1144 as used herein in reference to BoNT/A3 means modification of position M1144 when aligned with SEQ ID NO: 2 (i.e. modification of BoNT/A3 residue M1140). Alignment may be carried out using any of the methods described herein for determining sequence homology and/or % sequence identity.

[0020] An “otherwise identical clostridial neurotoxin” that lacks a modification of the invention may be an unmodified clostridial neurotoxin described herein and/or a clostridial neurotoxin comprising an unmodified BoNT/A H_{cc} domain described herein. Said “otherwise identical clostridial neurotoxin” may be one that exists in nature.

[0021] Any modification that increases oxidative resistance of the modified clostridial neurotoxin may be employed in the present invention. A modification may be a substitution of M1144, a deletion of M1144 or an indel at a site comprising (preferably consisting of) M1144. Preferably, a modification is substitution of M1144 with an amino acid that is resistant to oxidation.

[0022] The term “deletion” as used herein refers to removal of one or more amino acid residues of a polypeptide without replacement of one or more amino acid residues at the site of deletion. Thus, where one amino acid residue has been deleted from a polypeptide sequence having x number of amino acid residues (for example), the resultant polypeptide has x−1 amino acid residues.

[0023] The term “indel” as used herein refers to deletion of one or more amino acid residues of a polypeptide and insertion at the deletion site of a different number of amino acid residues (either greater or fewer amino acid residues) when compared to the number of amino acid residues deleted. Thus, for an indel where two amino acid residues have been deleted from a polypeptide sequence having x number of amino acid residues (for example), the resultant polypeptide has x−1 amino acid residues or x+≥1 amino acid residues. The insertion and deletion can be carried out in any order, sequentially or simultaneously.

[0024] The term “substitution” as used herein refers to replacement of one or more amino acid residues with the same number of amino acid residues at the same site. Thus, for a substitution of a polypeptide sequence having x number of amino acid residues (for example), the resultant polypeptide also has x amino acid residues. Preferably a substitution is a substitution at a single amino acid position.

[0025] The term “insertion” as used herein refers to addition of one or more amino acid residues of a polypeptide without deletion of one or more amino acid residues of the polypeptide at the site of insertion. Thus, where one amino acid residue has been inserted into a polypeptide sequence having x number of amino acid residues (for example), the resultant polypeptide has x+1 amino acid residues.

[0026] As discussed in more detail later, typically a modification is carried out by either modifying a nucleic acid encoding a native clostridial neurotoxin such that the modified clostridial neurotoxin encoded by the nucleic acid comprises the modification(s). Alternatively, a nucleic acid that encodes a modified clostridial neurotoxin comprising the modification(s) can be synthesized.

[0027] An “amino acid that is resistant to oxidation” as used herein preferably means any amino acid that is more resistant to oxidation than methionine. An amino acid that is resistant to oxidation may be selected from: valine, leucine, glycine, threonine, alanine, isoleucine, aspartic acid, glutamic acid, arginine, lysine, asparagine, glutamine, serine, and proline. In one embodiment an amino acid that is resistant to oxidation may be selected from: valine, leucine, and glycine. Preferably, an amino acid that is resistant to oxidation is selected from valine and leucine. In one embodiment, an amino acid that is resistant to oxidation is not glycine.

[0028] Alternatively, an amino acid that is resistant to oxidation may be a non-natural or non-standard amino acid, such as norleucine, isovaline, α-methyl valine, cycloleucine, or allo-threonine.

[0029] A modified clostridial neurotoxin of the invention may be at least 1%, 5%, 10%, 20%, 50%, 75%, 90% or 100% more resistant to oxidation than an otherwise identical clostridial neurotoxin lacking the modification.

[0030] Oxidation (including resistance to oxidation) of a clostridial neurotoxin may be assessed using a forced oxidation assay. Preferably, oxidation (e.g. resistance to oxidation) of a clostridial neurotoxin is assessed using a forced oxidation assay described in the present Examples (see “Forced Oxidation Study”).

[0031] In one embodiment, a modified clostridial neurotoxin of the invention may be substantially resistant to oxidation at a position corresponding to M1144 of SEQ ID NO: 2 when exposed to forced oxidation conditions. The term “substantially resistant to oxidation” as used in this context may mean that less than 10%, 5%, or 1% (preferably less than 0.1%) of modified clostridial neurotoxins in a composition are oxidised at a position corresponding to M1144 of SEQ ID NO: 2 under forced oxidation conditions. In other words, preferably, a modified clostridial neurotoxin of the invention is incapable of being oxidised at a position corresponding to M1144 of SEQ ID NO: 2 under forced oxidation conditions. In this context, the position corresponding to M1144 is the modified position.

[0032] A modified clostridial neurotoxin may comprise one or more further modifications of one or more surface exposed amino acid residues, e.g. one or more surface exposed amino acid residues susceptible to oxidation. Thus, a modified clostridial neurotoxin may comprise one or more further modifications of the following amino acids, which are susceptible to oxidation: methionine, cysteine, histidine, tryptophan, tyrosine, and phenylalanine (preferably methionine). For example, a modified clostridial neurotoxin may comprise one or more further modifications at an amino acid present in the H_{cc} domain (preferably in the SV2 binding domain), e.g. when compared to an unmodified H_{cc} domain (preferably an unmodified SV2 binding domain). Preferably, however, the modified clostridial neurotoxin does not comprise one or more further modifications in the H_{cc} domain, e.g. when compared to an unmodified H_{cc} domain, more preferably does not comprise one or more further modifications in the SV2 binding domain, e.g. when compared to an unmodified SV2 binding domain. In some embodiments the modified clostridial neurotoxin does not comprise one or more further modifications in the He domain, e.g. when compared to an unmodified He domain. In one embodiment the modified clostridial neurotoxin does not comprise one or more further modifications in the heavy chain, e.g. when compared to an unmodified heavy chain. In one embodiment the modified clostridial neurotoxin does not comprise one or more further modifications in the light chain, e.g. when compared to an unmodified light chain. In another embodiment the modified clostridial neurotoxin does not comprise one or more further modifications in the light chain e.g. when compared to an unmodified light chain, and does not comprise one or more further modifications in the heavy chain, e.g. when compared to an unmodified heavy chain.

[0033] In one aspect the invention provides a modified clostridial neurotoxin comprising a modified BoNT/A1 H_{cc} domain, a modified BoNT/A3 H_{cc} domain or a modified BoNT/A4 H_{cc} domain comprising RX₁X₂VX₃TTNIYLNSX₄LYX₅GT (SEQ ID NO: 102), wherein: X, is D or G; X₂ is S or N; X₃ is an amino acid that is resistant to oxidation; X₄ is S or T; and X₅ is M or R. Preferably X₄ is S. In said modified clostridial neurotoxin M1144 has been substituted with an amino acid that is resistant to oxidation.

[0034] SEQ ID NO: 102 is a consensus sequence comprised in the BoNT/A1, BoNT/A3, and BoNT/A4 SV2c binding domain of the H_{cc} domain, but wherein X₃ is an amino acid that is resistant to oxidation. In the native sequence, X₃ is methionine as shown in the table below:

| SEQ ID NO: | Sequence | Strain |
|---|---|---|
| 103 (part of SEQ | RGSVMTTNIYLNSSLYRGT | A1 Hall Str |
| ID NO: 2) | | (Reference) |
| 104 | RGNVMTTNIYLNSSLYMGT | A1 CDC297 |
| 105 | RGSVMTTNIYLNSTLYMGT | A3 Loch |
| (part of SEQ ID | | Maree |
| NO: 36) | | |
| 106 (part of SEQ | RDNVMTTNIYLNSSLYMGT | A4 |
| ID NO: 54) | | |

[0035] Any modified clostridial neurotoxin described herein may comprise a modified H_{cc} domain comprising (preferably consisting of) RX₁X₂VX₃TTNIYLNSX₄LYX₅GT (SEQ ID NO: 102), wherein: X, is D or G; X₂ is S or N; X₃ is an amino acid that is resistant to oxidation; X₄ is S or T; and X₅ is M or R. Preferably X₄ is S.

[0036] A modified clostridial neurotoxin described herein may comprise a modified H_{cc} domain comprising (preferably consisting of): RGSVXTTNIYLNSSLYRGT (SEQ ID NO: 107), RGNVXTTNIYLNSSLYMGT (SEQ ID NO: 108), RGSVXTTNIYLNSTLYMGT (SEQ ID NO: 109) or RDNVXTTNIYLNSSLYMGT (SEQ ID NO: 110), wherein X is an amino acid that is resistant to oxidation.

[0037] In one aspect the invention provides a modified clostridial neurotoxin comprising a modified BoNT/A1 H_{cc} domain, a modified BoNT/A3 H_{cc} domain or a modified BoNT/A4 H_{cc} domain comprising RX₁X₂VTTNIYLNSX₃LYX₄GT (SEQ ID NO: 111), wherein: X, is D or G; X₂ is S or N; X₃ is S or T; and X₄ is M or R. Preferably X₃ is S. In said modified clostridial neurotoxin M1144 has been deleted.

[0038] Any modified clostridial neurotoxin described herein may comprise a modified H_{cc} domain comprising (preferably consisting of) RX₁X₂VTTNIYLNSX₃LYX₄GT (SEQ ID NO: 111), wherein: X, is D or G; X₂ is S or N; X₃ is S or T; and X₄ is M or R. Preferably X₃ is S.

[0039] A modified clostridial neurotoxin described herein may comprise a modified H_{cc} domain comprising (preferably consisting of): RGSVTTNIYLNSSLYRGT (SEQ ID NO: 112), RGNVTTNIYLNSSLYMGT (SEQ ID NO: 113), RGSVTTNIYLNSTLYMGT (SEQ ID NO: 114) or RDNVTTNIYLNSSLYMGT (SEQ ID NO: 115).

[0040] In one embodiment, a modified clostridial neurotoxin of the invention does not comprise a BoNT/A2 H_{cc} domain. In one embodiment, a modified clostridial neurotoxin of the invention does not comprise a BoNT/A5 H_{cc} domain. In one embodiment, a modified clostridial neurotoxin of the invention does not comprise a BoNT/A6 H_{cc} domain. In one embodiment, a modified clostridial neurotoxin of the invention does not comprise a BoNT/A7 H_{cc} domain. In one embodiment, a modified clostridial neurotoxin of the invention does not comprise a BoNT/A8 H_{cc} domain. In one embodiment, a modified clostridial neurotoxin of the invention does not comprise a BoNT/A2 H_{cc} domain, a BoNT/A5 H_{cc} domain, a BoNT/A6 H_{cc} domain, a BoNT/A7 H_{cc} domain, or a BoNT/A8 H_{cc} domain.

[0041] Preferably, a modified clostridial neurotoxin of the invention is not a BoNT/A2, a BoNT/A5, a BoNT/A6, a BoNT/A7, or a BoNT/A8. A BoNT/A2 may comprise a polypeptide sequence having at least 70% sequence identity to SEQ ID NO: 139. For example, a BoNT/A2 may comprise a polypeptide sequence having at least 80%, 90%, 95%, or 98% sequence identity to SEQ ID NO: 139. Preferably BoNT/A2 comprises (or consists of) SEQ ID NO: 139. A BoNT/A5 may comprise a polypeptide sequence having at least 70% sequence identity to SEQ ID NO: 140 or 141. For example, a BoNT/A5 may comprise a polypeptide sequence having at least 80%, 90%, 95%, or 98% sequence identity to SEQ ID NO: 140 or 141. Preferably BoNT/A5 comprises (or consists of) SEQ ID NO: 140 or 141. A BoNT/A6 may comprise a polypeptide sequence having at least 70% sequence identity to SEQ ID NO: 142. For example, a BoNT/A6 may comprise a polypeptide sequence having at least 80%, 90%, 95%, or 98% sequence identity to SEQ ID NO: 142. Preferably BoNT/A6 comprises (or consists of) SEQ ID NO: 142. A BoNT/A7 may comprise a polypeptide sequence having at least 70% sequence identity to SEQ ID NO: 143. For example, a BoNT/A7 may comprise a polypeptide sequence having at least 80%, 90%, 95%, or 98% sequence identity to SEQ ID NO: 143. Preferably BoNT/A7 comprises (or consists of) SEQ ID NO: 143. A BoNT/A8 may comprise a polypeptide sequence having at least 70% sequence identity to SEQ ID NO: 144. For example, a BoNT/A8 may comprise a polypeptide sequence having at least 80%, 90%, 95%, or 98% sequence identity to SEQ ID NO: 144. Preferably BoNT/A8 comprises (or consists of) SEQ ID NO: 144.

[0042] Preferably, a modified clostridial neurotoxin of the invention does not comprise an H_{cc} domain corresponding to (or of): UniProtKB Accession No. D3|V23 (Sequence Version 1); UniProtKB Accession No. C7BEA8 (Sequence Version 1); or UniProtKB Accession No. C11PK2 (Sequence Version 1). Most preferably, a modified clostridial neurotoxin of the invention does not comprise a polypeptide sequence corresponding to (or of): UniProtKB Accession No. D3IV23 (Sequence Version 1); UniProtKB Accession No. C7BEA8 (Sequence Version 1); or UniProtKB Accession No. C11PK2 (Sequence Version 1).

[0043] A modified clostridial neurotoxin of the invention may comprise a modified BoNT/A1 H_{cc} domain, a modified BoNT/A3 H_{cc} domain or a modified BoNT/A4 H_{cc} domain, preferably a modified BoNT/A1 H_{cc} domain.

[0044] In one embodiment, a modified clostridial neurotoxin of the invention may comprise a modification at M1144 of an unmodified BoNT/A1 H_{cc} domain. An unmodified BoNT/A1 H_{cc} domain may comprise a polypeptide sequence having at least 70% sequence identity to any one of SEQ ID NOs: 62, 70 or 78. In one embodiment, an unmodified BoNT/A1 H_{cc} domain may comprise a polypeptide sequence having at least 80%, 90%, 95%, or 98% sequence identity to any one of SEQ ID NOs: 62, 70 or 78. Preferably, an unmodified BoNT/A1 H_{cc} domain comprises (more preferably consists of) any one of SEQ ID NOs: 62, 70 or 78. Of the sequences indicated, SEQ ID NO: 70 is most preferred.

[0045] A modified BoNT/A1 H_{cc} domain may comprise a polypeptide sequence having at least 70% sequence identity to any one of SEQ ID NOs: 63-69, 71-77 or 79-85. In one embodiment, a modified BoNT/A1 H_{cc} domain may comprise a polypeptide sequence having at least 80%, 90%, 95%, or 98% sequence identity to any one of SEQ ID NOs: 63-69, 71-77 or 79-85. Preferably, a modified BoNT/A1 H_{cc} domain comprises (more preferably consists of) any one of SEQ ID NOs: 63-69, 71-77 or 79-85. Of the sequences indicated, SEQ ID NOs: 71-77 are most preferred.

[0046] In one embodiment, a modified clostridial neurotoxin of the invention may comprise a modification at M1144 of an unmodified BoNT/A3 H_{cc} domain. An unmodified BoNT/A3 H_{cc} domain may comprise a polypeptide sequence having at least 70% sequence identity to SEQ ID NO: 86. In one embodiment, an unmodified BoNT/A3 H_{cc} domain may comprise a polypeptide sequence having at least 80%, 90%, 95%, or 98% sequence identity to SEQ ID NO: 86. Preferably, an unmodified BoNT/A3 H_{cc} domain comprises (more preferably consists of) SEQ ID NO: 86.

[0047] A modified BoNT/A3 H_{cc} domain may comprise a polypeptide sequence having at least 70% sequence identity to any one of SEQ ID NOs: 87-93. In one embodiment, a modified BoNT/A3 H_{cc} domain may comprise a polypeptide sequence having at least 80%, 90%, 95%, or 98% sequence identity to any one of SEQ ID NOs: 87-93. Preferably, a modified BoNT/A3 H_{cc} domain comprises (more preferably consists of) any one of SEQ ID NOs: 87-93.

[0048] In one embodiment, a modified clostridial neurotoxin of the invention may comprise a modification at M1144 of an unmodified BoNT/A4 H_{cc} domain. An unmodified BoNT/A4 H_{cc} domain may comprise a polypeptide sequence having at least 70% sequence identity to SEQ ID NO: 94. In one embodiment, an unmodified BoNT/A4 H_{cc} domain may comprise a polypeptide sequence having at least 80%, 90%, 95%, or 98% sequence identity to SEQ ID NO: 94. Preferably, an unmodified BoNT/A4 H_{cc} domain comprises (more preferably consists of) SEQ ID NO: 94.

[0049] A modified BoNT/A4 H_{cc} domain may comprise a polypeptide sequence having at least 70% sequence identity to any one of SEQ ID NOs: 95-101. In one embodiment, a modified BoNT/A4 H_{cc} domain may comprise a polypeptide sequence having at least 80%, 90%, 95%, or 98% sequence identity to any one of SEQ ID NOs: 95-101. Preferably, a modified BoNT/A4 H_{cc} domain comprises (more preferably consists of) any one of SEQ ID NOs: 95-101.

[0050] A modified clostridial neurotoxin of the invention may be a modified BoNT/A1, a modified BoNT/A3 or a modified BoNT/A4. Preferably, a modified clostridial neurotoxin of the invention is a modified BoNT/A1.

[0051] In one embodiment, a modified clostridial neurotoxin of the invention may comprise a modification at M1144 of an unmodified BoNT/A1. An unmodified BoNT/A1 may comprise a polypeptide sequence having at least 70% sequence identity to any one of SEQ ID NOs: 2, 11, 20, 29 or 38. In one embodiment, an unmodified BoNT/A1 may comprise a polypeptide sequence having at least 80%, 90%, 95%, or 98% sequence identity to any one of SEQ ID NOs: 2, 11, 20, 29 or 38. Preferably, an unmodified BoNT/A1 comprises (more preferably consists of) any one of SEQ ID NOs: 2, 11, 20, 29 or 38. Of the sequences indicated, SEQ ID NO: 11 is most preferred.

[0052] A modified BoNT/A1 may comprise a polypeptide sequence having at least 70% sequence identity to any one of SEQ ID NOs: 3-9, 12-18, 21-27, 30-36 or 39-45. In one embodiment, a modified BoNT/A1 may comprise a polypeptide sequence having at least 80%, 90%, 95%, or 98% sequence identity to any one of SEQ ID NOs: 3-9, 12-18, 21-27, 30-36 or 39-45. Preferably, a modified BoNT/A1 comprises (more preferably consists of) any one of SEQ ID NOs: 3-9, 12-18, 21-27, 30-36 or 39-45. Of the sequences indicated, SEQ ID NOs: 12-18 are most preferred.

[0053] In one embodiment, a modified clostridial neurotoxin of the invention may comprise a modification at M1144 of an unmodified BoNT/A3. An unmodified BoNT/A3 may comprise a polypeptide sequence having at least 70% sequence identity to SEQ ID NO: 46. In one embodiment, an unmodified BoNT/A3 may comprise a polypeptide sequence having at least 80%, 90%, 95%, or 98% sequence identity to SEQ ID NO: 46. Preferably, an unmodified BoNT/A3 comprises (more preferably consists of) SEQ ID NO: 46.

[0054] A modified BoNT/A3 may comprise a polypeptide sequence having at least 70% sequence identity to any one of SEQ ID NOs: 47-53. In one embodiment, a modified BoNT/A3 may comprise a polypeptide sequence having at least 80%, 90%, 95%, or 98% sequence identity to any one of SEQ ID NOs: 47-53. Preferably, a modified BoNT/A3 comprises (more preferably consists of) any one of SEQ ID NOs: 47-53.

[0055] In one embodiment, a modified clostridial neurotoxin of the invention may comprise a modification at M1144 of an unmodified BoNT/A4. An unmodified BoNT/A4 may comprise a polypeptide sequence having at least 70% sequence identity to SEQ ID NO: 54. In one embodiment, an unmodified BoNT/A4 may comprise a polypeptide sequence having at least 80%, 90%, 95%, or 98% sequence identity to SEQ ID NO: 54. Preferably, an unmodified BoNT/A4 comprises (more preferably consists of) SEQ ID NO: 54.

[0056] A modified BoNT/A4 may comprise a polypeptide sequence having at least 70% sequence identity to any one of SEQ ID NOs: 55-61. In one embodiment, a modified BoNT/A4 may comprise a polypeptide sequence having at least 80%, 90%, 95%, or 98% sequence identity to any one of SEQ ID NOs: 55-61. Preferably, a modified BoNT/A4 comprises (more preferably consists of) any one of SEQ ID NOs: 55-61.

[0057] The unmodified BoNT/A1 H_{cc} domains having SEQ ID NOs: 70 and 78 and corresponding BoNT/A1 polypeptides having SEQ ID NOs: 11, 20, 29, and 38 are themselves modified with respect to SEQ ID NOs: 2 and 62 (which exist in nature). Said clostridial neurotoxins are taught in WO 2015/004461 A1, which is incorporated herein by reference in its entirety. The modifications present in said clostridial neurotoxins provides increased potency and/or duration of action thereby allowing reduced dosages of the neurotoxins to be used compared to known clostridial neurotoxin therapeutics (or increased dosages without any additional adverse effects), thus providing further advantages. Indeed, said neurotoxins demonstrate a reduction in, or absence of, side effects compared to the use of an equivalent clostridial neurotoxin lacking said one or more amino acid modifications. This is achieved via modifications of surface exposed amino acid residues that increase the isoelectric point of the modified neurotoxins. Without wishing to be bound by theory, it is believed that said neurotoxins display longer tissue retention times at the site of administration due to favourable electrostatic interactions between the modified clostridial neurotoxin and anionic extracellular components (such as cell membranes and heparin sulphate proteoglycans) at the site of administration.

[0058] For the purpose of the present invention, SEQ ID NOs: 11, 20, 29, 38, 70, and 78 are categorised as “unmodified” as they comprise methionine at position 1144.

[0059] WO 2015/004461 A1 teaches that suitable modification of one or more of ASN 886, ASN 905, GLN 915, ASN 918, GLU 920, ASN 930, ASN 954, SER 955, GLN 991, GLU 992, GLN 995, ASN 1006, ASN 1025, ASN 1026, ASN 1032, ASN 1043, ASN 1046, ASN 1052, ASP 1058, HIS 1064, ASN 1080, GLU 1081, GLU 1083, ASP 1086, ASN 1188, ASP 1213, GLY 1215, ASN 1216, GLN 1229, ASN 1242, ASN 1243, SER 1274, and THR 1277 increases the isoelectric point of the modified clostridial neurotoxin to provide the above-mentioned advantages.

[0060] Thus, a modified clostridial neurotoxin may comprise a modified BoNT/A H_{cc} domain (preferably BoNT/A1 H_{cc} domain) comprising a further modification at one or more amino acid residue(s) selected from: ASN 1188, ASP 1213, GLY 1215, ASN 1216, GLN 1229, ASN 1242, ASN 1243, SER 1274, and THR 1277.

[0061] Thus, a modified clostridial neurotoxin (preferably modified BoNT/A1) may comprise a further modification at one or more amino acid residue(s) selected from: ASN 886, ASN 905, GLN 915, ASN 918, GLU 920, ASN 930, ASN 954, SER 955, GLN 991, GLU 992, GLN 995, ASN 1006, ASN 1025, ASN 1026, ASN 1032, ASN 1043, ASN 1046, ASN 1052, ASP 1058, HIS 1064, ASN 1080, GLU 1081, GLU 1083, ASP 1086, ASN 1188, ASP 1213, GLY 1215, ASN 1216, GLN 1229, ASN 1242, ASN 1243, SER 1274, and THR 1277.

[0062] The modification may be a modification when compared to SEQ ID NO: 2, wherein the amino acid residue numbering is determined by alignment with SEQ ID NO: 2.

[0063] The further amino acid residue(s) indicated for modification are surface exposed amino acid residue(s).

[0064] It is preferred that a modified clostridial neurotoxin comprises a further modification at one or more amino acid residue(s) selected from: ASN 886, ASN 930, ASN 954, SER 955, GLN 991, ASN 1025, ASN 1026, ASN 1052, ASN 1188, ASP 1213, GLY 1215, ASN 1216, GLN 1229, ASN 1242, ASN 1243, SER 1274 and THR 1277.

[0065] In a particularly preferred embodiment, a modified clostridial neurotoxin of the invention comprises only a modification at M1144 and a further modification at one or more of: ASN 886, ASN 930, ASN 954, SER 955, GLN 991, ASN 1025, ASN 1026, ASN 1052, ASN 1188, ASP 1213, GLY 1215, ASN 1216, GLN 1229, ASN 1242, ASN 1243, SER 1274 and THR 1277. For example, in one embodiment, a modified clostridial neurotoxin of the invention comprises SEQ ID NO: 2 modified only at M1144 and a further modification at one or more of: ASN 886, ASN 930, ASN 954, SER 955, GLN 991, ASN 1025, ASN 1026, ASN 1052, ASN 1188, ASP 1213, GLY 1215, ASN 1216, GLN 1229, ASN 1242, ASN 1243, SER 1274 and THR 1277. Put another way, it is preferred that the modifications when compared to SEQ ID NO: 2 consist of modifications at M1144 and a further modification at one or more of: ASN 886, ASN 930, ASN 954, SER 955, GLN 991, ASN 1025, ASN 1026, ASN 1052, ASN 1188, ASP 1213, GLY 1215, ASN 1216, GLN 1229, ASN 1242, ASN 1243, SER 1274 and THR 1277.

[0066] A modified clostridial neurotoxin may comprise at least 2, 3, 4, 5, 6 or 7 (preferably 7) further modifications at the indicated amino acid residue(s) in addition to a modification at M1144. A modified clostridial neurotoxin may comprise (preferably consist of) 1-30, 3-20, or 5-10 further amino acid modifications.

[0067] The further modification may be selected from:
[0068] i. substitution of an acidic surface exposed amino acid residue with a basic amino acid residue;
[0069] ii. substitution of an acidic surface exposed amino acid residue with an uncharged amino acid residue;
[0070] iii. substitution of an uncharged surface exposed amino acid residue with a basic amino acid residue;
[0071] iv. insertion of a basic amino acid residue; and
[0072] v. deletion of an acidic surface exposed amino acid residue.

[0073] A further modification as indicated above results in a modified clostridial neurotoxin that has an increased positive surface charge and increased isoelectric point when compared to the corresponding unmodified clostridial neurotoxin.

[0074] The isoelectric point (pI) is a specific property of a given protein. As is well known in the art, proteins are made from a specific sequence of amino acids (also referred to when in a protein as amino acid residues). Each amino acid of the standard set of twenty has a different side chain (or R group), meaning that each amino acid residue in a protein displays different chemical properties such as charge and hydrophobicity. These properties may be influenced by the surrounding chemical environment, such as the temperature and pH. The overall chemical characteristics of a protein will depend on the sum of these various factors.

[0075] Certain amino acid residues (detailed below) possess ionisable side chains that may display an electric charge depending on the surrounding pH. Whether such a side chain is charged or not at a given pH depends on the pKa of the relevant ionisable moiety, wherein pKa is the negative logarithm of the acid dissociation constant (Ka) for a specified proton from a conjugate base.

[0076] For example, acidic residues such as aspartic acid and glutamic acid have side chain carboxylic acid groups with pKa values of approximately 4.1 (precise pKa values may depend on temperature, ionic strength and the microenvironment of the ionisable group). Thus, these side chains exhibit a negative charge at a pH of 7.4 (often referred to as “physiological pH”). At low pH values, these side chains will become protonated and lose their charge.

[0077] Conversely, basic residues such as lysine and arginine have nitrogen-containing side chain groups with pKa values of approximately 10-12. These side chains therefore exhibit a positive charge at a pH of 7.4. These side chains will become de-protonated and lose their charge at high pH values.

[0078] The overall (net) charge of a protein molecule therefore depends on the number of acidic and basic residues present in the protein (and their degree of surface exposure) and on the surrounding pH. Changing the surrounding pH changes the overall charge on the protein.

[0079] Accordingly, for every protein there is a given pH at which the number of positive and negative charges is equal and the protein displays no overall net charge. This point is known as the isoelectric point (pI). The isoelectric point is a standard concept in protein biochemistry with which the skilled person would be familiar.

[0080] The isoelectric point (pI) is therefore defined as the pH value at which a protein displays a net charge of zero. An increase in pI means that a higher pH value is required for the protein to display a net charge of zero. Thus, an increase in pI represents an increase in the net positive charge of a protein at a given pH. Conversely, a decrease in pI means that a lower pH value is required for the protein to display a net charge of zero. Thus, a decrease in pI represents a decrease in the net positive charge of a protein at a given pH.

[0081] Methods of determining the pI of a protein are known in the art and would be familiar to a skilled person. By way of example, the pI of a protein can be calculated from the average pKa values of each amino acid present in the protein (“calculated pI”). Such calculations can be performed using computer programs known in the art, such as the Compute pI/MW Tool from ExPASy (https://web.expasy.org/compute_pi/), which is the preferred method for calculating pI in accordance with the present invention. Comparisons of pI values between different molecules should be made using the same calculation technique/program.

[0082] Where appropriate, the calculated pI of a protein can be confirmed experimentally using the technique of isoelectric focusing (“observed pI”). This technique uses electrophoresis to separate proteins according to their pI. Isoelectric focusing is typically performed using a gel that has an immobilised pH gradient. When an electric field is applied, the protein migrates through the pH gradient until it reaches the pH at which it has zero net charge, this point being the pI of the protein. Results provided by isoelectric focusing are typically relatively low-resolution in nature, and thus the present inventors believe that results provided by calculated pI (as described above) are more appropriate to use.

[0083] Throughout the present specification, “pI” means “calculated pI” unless otherwise stated.

[0084] The pI of a protein may be increased or decreased by altering the number of basic and/or acidic groups displayed on its surface. This can be achieved by modifying one or more amino acids of the protein. For example, an increase in pI may be provided by reducing the number of acidic residues, or by increasing the number of basic residues.

[0085] A modified clostridial neurotoxin comprising a further modification may have a pI value that is at least 0.2, 0.4, 0.5 or 1 pI units higher than that of an unmodified clostridial neurotoxin (e.g. SEQ ID NO: 2). Preferably, a modified clostridial neurotoxin may have a pI of at least 6.6, e.g. at least 6.8.

[0086] The properties of the 20 standard amino acids are indicated in the table below:

| Amino Acid | | | Side Chain |
|---|---|---|---|
| Aspartic acid | Asp | D | Charged (acidic) |
| Glutamic acid | Glu | E | Charged (acidic) |
| Arginine | Arg | R | Charged (basic) |
| Lysine | Lys | K | Charged (basic) |
| Histidine | His | H | Uncharged (polar) |
| Asparagine | Asn | N | Uncharged (polar) |
| Glutamine | Gln | Q | Uncharged (polar) |
| Serine | Ser | S | Uncharged (polar) |
| Threonine | Thr | T | Uncharged (polar) |
| Tyrosine | Tyr | Y | Uncharged (polar) |
| Methionine | Met | M | Uncharged (polar) |
| Tryptophan | Trp | W | Uncharged (polar) |
| Cysteine | Cys | C | Uncharged (polar) |
| Alanine | Ala | A | Uncharged (hydrophobic) |
| Glycine | Gly | G | Uncharged (hydrophobic) |
| Valine | Val | V | Uncharged (hydrophobic) |
| Leucine | Leu | L | Uncharged (hydrophobic) |
| Isoleucine | Ile | — | Uncharged (hydrophobic) |
| Proline | Pro | P | Uncharged (hydrophobic) |
| Phenylalanine | Phe | F | Uncharged (hydrophobic) |

[0087] The following amino acids are considered charged amino acids: aspartic acid (negative), glutamic acid (negative), arginine (positive), and lysine (positive).

[0088] At a pH of 7.4, the side chains of aspartic acid (pKa 3.1) and glutamic acid (pKa 4.1) have a negative charge, while the side chains of arginine (pKa 12.5) and lysine (pKa 10.8) have a positive charge. Aspartic acid and glutamic acid are referred to as acidic amino acid residues. Arginine and lysine are referred to as basic amino acid residues.

[0089] The following amino acids are considered uncharged, polar (meaning they can participate in hydrogen bonding) amino acids: asparagine, glutamine, histidine, serine, threonine, tyrosine, cysteine, methionine, and tryptophan.

[0090] The following amino acids are considered uncharged, hydrophobic amino acids: alanine, valine, leucine, isoleucine, phenylalanine, proline, and glycine.

[0091] Preferably, the further modification is a substitution. The replacement amino acid residue may be one of the 20 standard amino acids, as described above. Alternatively, the replacement amino acid in an amino acid substitution may be a non-standard or non-natural amino acid (an amino acid that is not part of the standard set of 20 described above). By way of example, the replacement amino acid may be a basic non-standard or non-natural amino acid, e.g. L-Ornithine, L-2-amino-3-guanidinopropionic acid, or D-isomers of Lysine, Arginine and Ornithine). Methods for introducing non-standard or non-natural amino acids into proteins are known in the art and include recombinant protein synthesis using E. coli auxotrophic expression hosts. In one embodiment, the substitution is selected from: substitution of an acidic amino acid residue with a basic amino acid residue, substitution of an acidic amino acid residue with an uncharged amino acid residue, and substitution of an uncharged amino acid residue with a basic amino acid residue. In one embodiment, wherein the substitution is a substitution of an acidic amino acid residue with an uncharged amino acid residue, the acidic amino acid residue is replaced with its corresponding uncharged amide amino acid residue (i.e. aspartic acid is replaced with asparagine, and glutamic acid is replaced with glutamine).

[0092] Preferably, the basic amino acid residue is a lysine residue or an arginine residue. In other words, the substitution is preferably substitution with lysine or arginine. Most preferably, the modification is substitution with lysine.

[0093] Preferably, a modified clostridial neurotoxin comprising the one or more further modifications comprises between 4 and 40 amino acid modifications located in the clostridial toxin H_{CN} domain. Said modified clostridial neurotoxin preferably also has pI of at least 6.6. In addition to a modification at M1144, said modified clostridial neurotoxin preferably comprises modifications of at least 4 amino acids selected from: ASN 886, ASN 930, ASN 954, SER 955, GLN 991, ASN 1025, ASN 1026, and ASN 1052, wherein said modification comprises substitution of the amino acids with a lysine residue or an arginine residue. For example, in addition to a modification at M1144, said modified clostridial neurotoxin may comprise modifications of at least 5 amino acids selected from: ASN 886, ASN 930, ASN 954, SER 955, GLN 991, ASN 1025, ASN 1026, ASN 1052, and GLN 1229, wherein said modification comprises substitution of the amino acids with a lysine residue or an arginine residue.

[0094] Following the further modification, the further modified clostridial neurotoxin is capable of binding to the target cell receptors that unmodified BoNT/A (e.g. SEQ ID NO: 2) binds.

[0095] For a modified clostridial neurotoxin comprising the one or more further modifications, one way in which these advantageous properties (which represent an increase in the therapeutic index) may be defined is in terms of the Safety Ratio of the modified neurotoxin. In this regard, undesired effects of a clostridial neurotoxin (caused by diffusion of the toxin away from the site of administration) can be assessed experimentally by measuring percentage bodyweight loss in a relevant animal model (e.g. a mouse, where loss of bodyweight is detected within seven days of administration). Conversely, desired on-target effects of a clostridial neurotoxin can be assessed experimentally by Digital Abduction Score (DAS) assay, a measurement of muscle paralysis. The DAS assay may be performed by injection of 20 μl of clostridial neurotoxin, formulated in Gelatin Phosphate Buffer, into the mouse gastrocnemius/soleus complex, followed by assessment of Digital Abduction Score using the method of Aoki (Aoki K R, Toxicon 39: 1815-1820; 2001). In the DAS assay, mice are suspended briefly by the tail in order to elicit a characteristic startle response in which the mouse extends its hind limbs and abducts its hind digits. Following clostridial neurotoxin injection, the varying degrees of digit abduction are scored on a five-point scale (0=normal to 4=maximal reduction in digit abduction and leg extension).

[0096] The Safety Ratio of a clostridial neurotoxin may then be expressed as the ratio between the amount of toxin required for a 10% drop in bodyweight (measured at peak effect within the first seven days after dosing in a mouse) and the amount of toxin required for a DAS score of 2. High Safety Ratio scores are therefore desired and indicate a toxin that is able to effectively paralyse a target muscle with little undesired off-target effects. A modified clostridial neurotoxin comprising the one or more further modifications may have a Safety Ratio that is higher than the Safety Ratio of an equivalent unmodified (native) botulinum toxin (e.g. SEQ ID NO: 2) or when compared to a modified clostridial neurotoxin that does not comprise the one or more further modifications.

[0097] Thus, in one embodiment, a modified clostridial neurotoxin comprising the one or more further modifications has a Safety Ratio of at least 8 (for example, at least 8, 9, 10, 15, 20, 25, 30, 35, 40, 45 or 50), wherein Safety Ratio is calculated as: dose of toxin required for −10% bodyweight change (pg/mouse) divided by DAS ED₅₀ (pg/mouse) [ED₅₀=dose required to produce a DAS score of 2].

[0098] In one embodiment, a modified clostridial neurotoxin comprising the one or more further modifications has a Safety Ratio of at least 10. In one embodiment, a modified clostridial neurotoxin comprising the one or more further modifications has a Safety Ratio of at least 15.

[0099] The modified clostridial neurotoxins of the present invention are preferably free from the complexing proteins that are present in a naturally occurring clostridial neurotoxin complex.

[0100] Methods for modifying proteins by substitution, insertion or deletion of amino acid residues or via indels are known in the art. Byway of example, amino acid modifications may be introduced by modification of a nucleic acid sequence (e.g. DNA sequence) encoding a polypeptide (e.g. encoding an unmodified BoNT/A H_{cc} domain). This can be achieved using standard molecular cloning techniques, for example by site-directed mutagenesis where short strands of DNA (oligonucleotides) coding for the desired amino acid(s) are used to replace the original coding sequence using a polymerase enzyme, or by inserting/deleting parts of the gene with various enzymes (e.g., ligases and restriction endonucleases). Alternatively, a modified gene sequence can be chemically synthesised.

[0101] Thus, in one aspect, the invention provides a method for producing a modified clostridial neurotoxin, the method comprising:
[0102] (a) providing a first nucleic acid encoding (at least) a botulinum neurotoxin A (BoNT/A) H_{cc} domain and modifying the first nucleic acid to introduce a modification at methionine 1144 (M1144) of the encoded H_{cc} domain, thereby producing a second nucleic acid, wherein the modification increases oxidative resistance of the modified clostridial neurotoxin when compared to an otherwise identical clostridial neurotoxin lacking the modification; or
[0103] (b) synthesizing a nucleic acid that encodes (at least) a modified clostridial neurotoxin comprising a botulinum neurotoxin A (BoNT/A) H_{cc} domain, wherein the H_{cc} domain comprises a modification of methionine 1144 (M1144), and wherein the modification increases oxidative resistance of the modified clostridial neurotoxin when compared to an otherwise identical clostridial neurotoxin lacking the modification, thereby providing a synthesized nucleic acid; and
[0104] (c) expressing the second nucleic acid or the synthesized nucleic acid, respectively, thereby producing the modified clostridial neurotoxin; and
[0105] (d) optionally isolating the modified clostridial neurotoxin; and
[0106] (e) optionally activating the modified clostridial neurotoxin by contacting the (single-chain) modified clostridial neurotoxin with a protease that cleaves the (single-chain) modified clostridial neurotoxin at a recognition site (cleavage site) located between the light chain and heavy chain, thereby converting the (single-chain) modified clostridial neurotoxin into a di-chain modified clostridial neurotoxin, wherein the light chain and heavy chain are joined together by a disulphide bond.

[0107] For example, a method for producing a modified clostridial neurotoxin may comprise:
[0108] (a) providing a first nucleic acid encoding (at least) a botulinum neurotoxin A (BoNT/A) H_{cc} domain and modifying the first nucleic acid to introduce a modification at methionine 1144 (M1144) of the encoded H_{cc} domain, thereby producing a second nucleic acid, wherein the modification increases oxidative resistance of the modified clostridial neurotoxin when compared to an otherwise identical clostridial neurotoxin lacking the modification;
[0109] (b) expressing the second nucleic acid, thereby producing the modified clostridial neurotoxin; and
[0110] (c) optionally isolating the modified clostridial neurotoxin; and
[0111] (d) optionally activating the modified clostridial neurotoxin by contacting the (single-chain) modified clostridial neurotoxin with a protease that cleaves the (single-chain) modified clostridial neurotoxin at a recognition site (cleavage site) located between the light chain and heavy chain, thereby converting the (single-chain) modified clostridial neurotoxin into a di-chain modified clostridial neurotoxin, wherein the light chain and heavy chain are joined together by a disulphide bond.

[0112] For example, a method for producing a modified clostridial neurotoxin may comprise:
[0113] (a) synthesizing a nucleic acid that encodes (at least) a botulinum neurotoxin A (BoNT/A) H_{cc} domain, wherein the H_{cc} domain comprises a modification of methionine 1144 (M1144), and wherein the modification increases oxidative resistance of the modified clostridial neurotoxin when compared to an otherwise identical clostridial neurotoxin lacking the modification, thereby providing a synthesized nucleic acid;
[0114] (b) expressing the synthesized nucleic acid, thereby producing the modified clostridial neurotoxin; and
[0115] (c) optionally isolating the modified clostridial neurotoxin; and
[0116] (d) optionally activating the modified clostridial neurotoxin by contacting the (single-chain) modified clostridial neurotoxin with a protease that cleaves the (single-chain) modified clostridial neurotoxin at a recognition site (cleavage site) located between the light chain and heavy chain, thereby converting the (single-chain) modified clostridial neurotoxin into a di-chain modified clostridial neurotoxin, wherein the light chain and heavy chain are joined together by a disulphide bond.

[0117] The method may comprise:
[0118] (a) providing a first nucleic acid encoding (at least) a botulinum neurotoxin A (BoNT/A) H_{cc} domain and modifying the first nucleic acid to introduce a modification at methionine 1144 (M1144) of the encoded H_{cc} domain, thereby producing a second nucleic acid, wherein the modification increases oxidative resistance of the modified clostridial neurotoxin when compared to an otherwise identical clostridial neurotoxin lacking the modification; or
[0119] (b) synthesizing a nucleic acid that encodes (at least) a botulinum neurotoxin A (BoNT/A) H_{cc} domain, wherein the H_{cc} domain comprises a modification of methionine 1144 (M1144), and wherein the modification increases oxidative resistance of the modified clostridial neurotoxin when compared to an otherwise identical clostridial neurotoxin lacking the modification, thereby providing a synthesized nucleic acid; and
[0120] (c) expressing the second nucleic acid or the synthesized nucleic acid, respectively, thereby producing a single-chain modified clostridial neurotoxin; and
[0121] (d) isolating the single-chain modified clostridial neurotoxin.

[0122] The method may comprise:
[0123] (a) providing a first nucleic acid encoding (at least) a botulinum neurotoxin A (BoNT/A) H_{cc} domain and modifying the first nucleic acid to introduce a modification at methionine 1144 (M1144) of the encoded H_{cc} domain, thereby producing a second nucleic acid, wherein the modification increases oxidative resistance of the modified clostridial neurotoxin when compared to an otherwise identical clostridial neurotoxin lacking the modification; or
[0124] (b) synthesizing a nucleic acid that encodes (at least) a botulinum neurotoxin A (BoNT/A) H_{cc} domain, wherein the H_{cc} domain comprises a modification of methionine 1144 (M1144), and wherein the modification increases oxidative resistance of the modified clostridial neurotoxin when compared to an otherwise identical clostridial neurotoxin lacking the modification, thereby providing a synthesized nucleic acid; and
[0125] (c) expressing the second nucleic acid or the synthesized nucleic acid, respectively, thereby producing a single-chain modified clostridial neurotoxin; and
[0126] (d) activating the single-chain modified clostridial neurotoxin by contacting the single-chain modified clostridial neurotoxin with a protease that cleaves the single-chain modified clostridial neurotoxin at a recognition site (cleavage site) located between the light chain and heavy chain, thereby converting the single-chain modified clostridial neurotoxin into a di-chain modified clostridial neurotoxin, wherein the light chain and heavy chain are joined together by a disulphide bond.

[0127] Preferably, the di-chain modified clostridial neurotoxin is then isolated.

[0128] Preferably, the method may comprise:
[0129] (a) providing a first nucleic acid encoding (at least) a botulinum neurotoxin A (BoNT/A) H_{cc} domain and modifying the first nucleic acid to introduce a modification at methionine 1144 (M1144) of the encoded H_{cc} domain, thereby producing a second nucleic acid, wherein the modification increases oxidative resistance of the modified clostridial neurotoxin when compared to an otherwise identical clostridial neurotoxin lacking the modification; or
[0130] (b) synthesizing a nucleic acid that encodes (at least) a botulinum neurotoxin A (BoNT/A) H_{cc} domain, wherein the H_{cc} domain comprises a modification of methionine 1144 (M1144), and wherein the modification increases oxidative resistance of the modified clostridial neurotoxin when compared to an otherwise identical clostridial neurotoxin lacking the modification, thereby providing a synthesized nucleic acid; and
[0131] (c) expressing the second nucleic acid or the synthesized nucleic acid, respectively, thereby producing a single-chain modified clostridial neurotoxin; and (d) isolating the single-chain modified clostridial neurotoxin; and
[0132] (e) activating the single-chain modified clostridial neurotoxin by contacting the single-chain modified clostridial neurotoxin with a protease that cleaves the single-chain modified clostridial neurotoxin at a recognition site (cleavage site) located between the light chain and heavy chain, thereby converting the single-chain modified clostridial neurotoxin into a di-chain modified clostridial neurotoxin, wherein the light chain and heavy chain are joined together by a disulphide bond.

[0133] The invention also provides corresponding methods for increasing the oxidative resistance of a clostridial neurotoxin. Thus, in one aspect, the invention provides a method for increasing the oxidative resistance of a clostridial neurotoxin, the method comprising:
[0134] (a) providing a first nucleic acid encoding (at least) a botulinum neurotoxin A (BoNT/A) H_{cc} domain and modifying the first nucleic acid to introduce a modification at methionine 1144 (M1144) of the encoded H_{cc} domain, thereby producing a second nucleic acid, wherein the modification increases oxidative resistance of the modified clostridial neurotoxin when compared to an otherwise identical clostridial neurotoxin lacking the modification; or
[0135] (b) synthesizing a nucleic acid that encodes (at least) a modified clostridial neurotoxin comprising a botulinum neurotoxin A (BoNT/A) H_{cc} domain, wherein the H_{cc} domain comprises a modification of methionine 1144 (M1144), and wherein the modification increases oxidative resistance of the modified clostridial neurotoxin when compared to an otherwise identical clostridial neurotoxin lacking the modification, thereby providing a synthesized nucleic acid; and
[0136] (c) expressing the second nucleic acid or the synthesized nucleic acid, respectively, thereby producing the modified clostridial neurotoxin; and (d) optionally isolating the modified clostridial neurotoxin; and
[0137] (e) optionally activating the modified clostridial neurotoxin by contacting the (single-chain) modified clostridial neurotoxin with a protease that cleaves the (single-chain) modified clostridial neurotoxin at a recognition site (cleavage site) located between the light chain and heavy chain, thereby converting the (single-chain) modified clostridial neurotoxin into a di-chain modified clostridial neurotoxin, wherein the light chain and heavy chain are joined together by a disulphide bond.

[0138] Preferably, the di-chain modified clostridial neurotoxin is isolated.

[0139] The second nucleic acid or synthesized nucleic acid preferably encodes a modified clostridial neurotoxin comprising a botulinum neurotoxin A (BoNT/A) H_{cc} domain. Thus, said nucleic acid may encode a clostridial neurotoxin L-chain and H-chain, said H-chain comprising a translocation domain and an He domain, wherein the He domain comprises the H_{cc} domain modified at M1144.

[0140] The invention also provides a modified clostridial neurotoxin obtainable by a method of the invention. The term “obtainable” as used herein encompasses the term “obtained”. In one embodiment “obtainable” means “obtained”.

[0141] A first nucleic acid for use in a method of the invention may comprise a nucleic acid sequence that encodes an unmodified BoNT/A H_{cc} domain described herein. The first nucleic acid may comprise a nucleic acid that encodes a clostridial neurotoxin (e.g. comprising a light-chain and heavy-chain) comprising methionine at position 1144. Preferably, a first nucleic acid comprises a nucleic acid sequence that encodes an unmodified BoNT/A described herein.

[0142] In one embodiment, a first nucleic acid comprises a nucleic acid having at least 70% sequence identity to any one of SEQ ID NOs: 1, 10, 19, 28 or 37. In one embodiment, a first nucleic acid comprises a nucleic acid having at least 80%, 90%, 95%, or 98% sequence identity to any one of SEQ ID NOs: 1, 10, 19, 28 or 37. Preferably, a first nucleic acid comprises (more preferably consists of) any one of SEQ ID NOs: 1, 10, 19, 28 or 37. Of the sequences indicated, SEQ ID NO: 10 is most preferred.

[0143] In one embodiment, the second nucleic acid or synthesized nucleic acid comprises a nucleic acid having at least 70% sequence identity to any one of SEQ ID NOs: 136-138. In one embodiment, the second nucleic acid or synthesized nucleic acid comprises a nucleic acid having at least 80%, 90%, 95%, or 98% sequence identity to any one of SEQ ID NOs: 136-138. Preferably, the second nucleic acid or synthesized nucleic acid comprises (more preferably consists of) any one of SEQ ID NOs: 136-138.

[0144] In one embodiment the modification comprises replacing a codon encoding for M1144 with a codon encoding for valine (e.g. GTG), leucine (e.g. CTG) or glycine (e.g. GGT).

[0145] In a related aspect, the invention provides a nucleic acid (preferably DNA) sequence encoding a modified clostridial neurotoxin of the invention. In one embodiment, the nucleic acid sequence is prepared as part of a DNA vector comprising a promoter and a terminator.

[0146] In one embodiment, the nucleic acid comprises a nucleic acid having at least 70% sequence identity to any one of SEQ ID NOs: 136-138. In one embodiment, the nucleic acid comprises a nucleic acid having at least 80%, 90%, 95%, or 98% sequence identity to any one of SEQ ID NOs: 136-138. Preferably, the nucleic acid comprises (more preferably consists of) any one of SEQ ID NOs: 136-138.

[0147] The modified clostridial neurotoxins of the present invention can be produced using recombinant nucleic acid technologies. Thus, in one embodiment, a modified clostridial neurotoxin (as described above) is a recombinant modified clostridial neurotoxin.

[0148] In a preferred embodiment, the vector has a promoter selected from:

| Promoter | Induction Agent | Typical Induction Condition |
|---|---|---|
| Tac (hybrid) | IPTG | 0.2 mM (0.05-2.0 mM) |
| AraBAD | L-arabinose | 0.2% (0.002-0.4%) |
| T7-lac operator | IPTG | 0.2 mM (0.05-2.0 mM) |

[0149] In another preferred embodiment, the vector has a promoter selected from:

| Promoter | Induction Agent | Typical Induction Condition |
|---|---|---|
| Tac (hybrid) | IPTG | 0.2 mM (0.05-2.0 mM) |
| AraBAD | L-arabinose | 0.2% (0.002-0.4%) |
| T7-lac operator | IPTG | 0.2 mM (0.05-2.0 mM) |
| T5-lac operator | IPTG | 0.2 mM (0.05-2.0 mM) |

[0150] The nucleic acid molecules of the invention may be made using any suitable process known in the art. Thus, the nucleic acid molecules may be made using chemical synthesis techniques. Alternatively, the nucleic acid molecules of the invention may be made using molecular biology techniques.

[0151] For example, a nucleic acid of the present invention may be designed in silico, and then synthesised by conventional synthesis techniques.

[0152] The above-mentioned nucleic acid sequence information is optionally modified for codon-biasing according to the ultimate host cell (e.g. Escherichia coli) expression system that is to be employed.

[0153] The terms “nucleotide sequence” and “nucleic acid” are used synonymously herein. Preferably the nucleotide sequence is a DNA sequence.

[0154] A nucleic acid sequence described herein may be expressed to produce a modified clostridial neurotoxin using any technique known in the art. For example, a nucleic acid may be expressed in a cell-free in vitro system. Alternatively, a nucleic acid is preferably expressed in a suitable host cell, such as an Escherichia coli host cell.

[0155] Thus, in one aspect, the invention provides a method for producing a single-chain modified clostridial neurotoxin having a light chain and a heavy chain, the method comprising expressing a nucleic acid of the invention in a suitable host cell, lysing the host cell to provide a host cell homogenate containing the single-chain modified clostridial neurotoxin, and isolating the single-chain modified clostridial neurotoxin.

[0156] Subsequent to expression, a modified clostridial neurotoxin may be isolated. Isolating a modified clostridial neurotoxin can be achieved by any purification methods, such as chromatographic or immunoaffinity methods, known to the person skilled in the art. A purification tag can assist in isolation. Thus, a modified clostridial neurotoxin described herein may comprise one or more tags (e.g. purification tags), such as a His-tag or Strep-tag. It is preferred that the modified clostridial neurotoxins do not comprise such tags or that the tag is removed before use. The modified clostridial neurotoxins may also comprise one or more cleavage sites, such as a TEV cleavage site, to facilitate removal of a tag.

[0157] A modified clostridial neurotoxin may be converted from a single-chain polypeptide to a corresponding di-chain polypeptide at any point during production. However, it is preferred that this is carried out after isolating the modified clostridial neurotoxin.

[0158] Thus, in one aspect, the invention provides a method of activating a modified clostridial neurotoxin, the method comprising providing a single-chain modified clostridial neurotoxin obtainable by a method of the invention, contacting the single-chain modified clostridial neurotoxin with a protease that cleaves the single-chain modified clostridial neurotoxin at a recognition site (cleavage site) located between the light chain and heavy chain, thereby converting the single-chain modified clostridial neurotoxin into a di-chain modified clostridial neurotoxin, wherein the light chain and heavy chain are joined together by a disulphide bond.

[0159] The present invention therefore provides a di-chain clostridial neurotoxin obtainable by a method of the invention.

[0160] Activation is preferably carried out by contacting the modified clostridial neurotoxin with Lys-C as described in WO 2014/080206 A1.

[0161] As discussed above, clostridial neurotoxins are formed from two polypeptide chains, the heavy chain (H-chain), which has a molecular mass of approximately 100 kDa, and the light chain (L-chain), which has a molecular mass of approximately 50 kDa. The H-chain comprises a C-terminal targeting component (receptor binding domain or He domain) and an N-terminal translocation component (H_{N} domain).

[0162] Examples of light chain reference sequences include:
[0163] Botulinum type A neurotoxin: amino acid residues 1-448
[0164] Botulinum type B neurotoxin: amino acid residues 1-440
[0165] Botulinum type C1 neurotoxin: amino acid residues 1-441
[0166] Botulinum type D neurotoxin: amino acid residues 1-445
[0167] Botulinum type E neurotoxin: amino acid residues 1-422
[0168] Botulinum type F neurotoxin: amino acid residues 1-439
[0169] Botulinum type G neurotoxin: amino acid residues 1-441
[0170] Tetanus neurotoxin: amino acid residues 1-457

[0171] For recently-identified BoNT/X, the L-chain has been reported as corresponding to amino acids 1-439 thereof, with the L-chain boundary potentially varying by approximately 25 amino acids (e.g. 1-414 or 1-464).

[0172] The above-identified reference sequences should be considered a guide, as slight variations may occur according to sub-serotypes. By way of example, US 2007/0166332 (hereby incorporated by reference in its entirety) cites slightly different clostridial sequences:
[0173] Botulinum type A neurotoxin: amino acid residues M1-K448
[0174] Botulinum type B neurotoxin: amino acid residues M1-K441
[0175] Botulinum type C1 neurotoxin: amino acid residues M1-K449
[0176] Botulinum type D neurotoxin: amino acid residues M1-R445
[0177] Botulinum type E neurotoxin: amino acid residues M1-R422
[0178] Botulinum type F neurotoxin: amino acid residues M1-K439
[0179] Botulinum type G neurotoxin: amino acid residues M1-K446
[0180] Tetanus neurotoxin: amino acid residues M1-A457

[0181] A Translocation Domain is a molecule that enables translocation of a protease into a target cell such that a functional expression of protease activity occurs within the cytosol of the target cell. Whether any molecule (e.g. a protein or peptide) possesses the requisite translocation function of the present invention may be confirmed by any one of a number of conventional assays.

[0182] For example, Shone C. (1987) describes an in vitro assay employing liposomes, which are challenged with a test molecule. Presence of the requisite translocation function is confirmed by release from the liposomes of K⁺ and/or labelled NAD, which may be readily monitored [see Shone C. (1987) Eur. J. Biochem; vol. 167(1): pp. 175-180].

[0183] A further example is provided by Blaustein R. (1987), which describes a simple in vitro assay employing planar phospholipid bilayer membranes. The membranes are challenged with a test molecule and the requisite translocation function is confirmed by an increase in conductance across said membranes [see Blaustein (1987) FEBS Letts; vol. 226, no. 1: pp. 115-120].

[0184] Additional methodology to enable assessment of membrane fusion and thus identification of Translocation Domains suitable for use in the present invention are provided by Methods in Enzymology Vol 220 and 221, Membrane Fusion Techniques, Parts A and B, Academic Press 1993.

[0185] The present invention also embraces variant translocation domains, so long as the variant domains still demonstrate the requisite translocation activity. By way of example, a variant may have at least 70%, preferably at least 80%, more preferably at least 90%, and most preferably at least 95% or at least 98% amino acid sequence homology with a reference translocation domain. The term fragment, when used in relation to a translocation domain, means a peptide having at least 20, preferably at least 40, more preferably at least 80, and most preferably at least 100 amino acid residues of the reference translocation domain. In the case of a clostridial translocation domain, the fragment preferably has at least 100, preferably at least 150, more preferably at least 200, and most preferably at least 250 amino acid residues of the reference translocation domain (e.g. H_{N} domain). Translocation ‘fragments’ of the present invention embrace fragments of variant translocation domains based on the reference sequences.

[0186] The Translocation Domain is preferably capable of formation of ion-permeable pores in lipid membranes under conditions of low pH. Preferably it has been found to use only those portions of the protein molecule capable of pore-formation within the endosomal membrane.

[0187] The Translocation Domain may be obtained from a microbial protein source, in particular from a bacterial or viral protein source. Hence, in one embodiment, the Translocation Domain is a translocating domain of an enzyme, such as a bacterial toxin or viral protein.

[0188] It is well documented that certain domains of bacterial toxin molecules are capable of forming such pores. It is also known that certain translocation domains of virally expressed membrane fusion proteins are capable of forming such pores. Such domains may be employed in the present invention.

[0189] The Translocation Domain may be of a clostridial origin, such as the H_{N} domain (or a functional component thereof). H_{N} means a portion or fragment of the H-chain of a clostridial neurotoxin approximately equivalent to the amino-terminal half of the H-chain, or the domain corresponding to that fragment in the intact H-chain.

[0190] Examples of suitable (reference) Translocation Domains include:
[0191] Botulinum type A neurotoxin—amino acid residues (449-871)
[0192] Botulinum type B neurotoxin—amino acid residues (441-858)
[0193] Botulinum type C neurotoxin—amino acid residues (442-866)
[0194] Botulinum type D neurotoxin—amino acid residues (446-862)
[0195] Botulinum type E neurotoxin—amino acid residues (423-845)
[0196] Botulinum type F neurotoxin—amino acid residues (440-864)
[0197] Botulinum type G neurotoxin—amino acid residues (442-863)
[0198] Tetanus neurotoxin—amino acid residues (458-879)

[0199] The above-identified reference sequence should be considered a guide as slight variations may occur according to sub-serotypes. By way of example, US 2007/0166332 (hereby incorporated by reference thereto) cites slightly different clostridial sequences:
[0200] Botulinum type A neurotoxin—amino acid residues (A449-K871)
[0201] Botulinum type B neurotoxin—amino acid residues (A442-S858)
[0202] Botulinum type C neurotoxin—amino acid residues (T450-N866)
[0203] Botulinum type D neurotoxin—amino acid residues (D446-N862)
[0204] Botulinum type E neurotoxin—amino acid residues (K423-K845)
[0205] Botulinum type F neurotoxin—amino acid residues (A440-K864)
[0206] Botulinum type G neurotoxin—amino acid residues (S447-S863)
[0207] Tetanus neurotoxin—amino acid residues (S458-V879)

[0208] In the context of the present invention, a variety of clostridial neurotoxin H_{N} regions comprising a translocation domain can be useful in aspects of the present invention with the proviso that these active fragments can facilitate the release of a non-cytotoxic protease (e.g. a clostridial L-chain) from intracellular vesicles into the cytoplasm of the target cell and thus participate in executing the overall cellular mechanism whereby a clostridial neurotoxin proteolytically cleaves a substrate. The H_{N} regions from the heavy chains of clostridial neurotoxins are approximately 410-430 amino acids in length and comprise a translocation domain. Research has shown that the entire length of a H_{N} region from a clostridial neurotoxin heavy chain is not necessary for the translocating activity of the translocation domain. Thus, aspects of this embodiment can include clostridial neurotoxin H_{N} regions comprising a translocation domain having a length of, for example, at least 350 amino acids, at least 375 amino acids, at least 400 amino acids and at least 425 amino acids. Other aspects of this embodiment can include clostridial neurotoxin H_{N} regions comprising translocation domain having a length of, for example, at most 350 amino acids, at most 375 amino acids, at most 400 amino acids and at most 425 amino acids.

[0209] For further details on the genetic basis of toxin production in Clostridium botulinum and C. tetani, we refer to Henderson et al (1997) in The Clostridia: Molecular Biology and Pathogenesis, Academic press.

[0210] The term H_{N} embraces naturally-occurring neurotoxin H_{N} portions, and modified H_{N} portions having amino acid sequences that do not occur in nature and/or synthetic amino acid residues, so long as the modified H_{N} portions still demonstrate the above-mentioned translocation function.

[0211] Alternatively, the Translocation Domain may be of a non-clostridial origin. Examples of non-clostridial (reference) Translocation Domain origins include, but not be restricted to, the translocation domain of diphtheria toxin [O'Keefe et al., Proc. Natl. Acad. Sci. USA (1992) 89, 6202-6206; Silverman et al., J. Biol. Chem. (1993) 269, 22524-22532; and London, E. (1992) Biochem. Biophys. Acta., 1112, pp. 25-51], the translocation domain of Pseudomonas exotoxin type A [Prior et al. Biochemistry (1992) 31, 3555-3559], the translocation domains of anthrax toxin [Blanke et al. Proc. Natl. Acad. Sci. USA (1996) 93, 8437-8442], a variety of fusogenic or hydrophobic peptides of translocating function [Plank et al. J. Biol. Chem. (1994) 269, 12918-12924; and Wagner et al (1992) PNAS, 89, pp. 7934-7938], and amphiphilic peptides [Murata et al (1992) Biochem., 31, pp. 1986-1992]. The Translocation Domain may mirror the Translocation Domain present in a naturally-occurring protein, or may include amino acid variations so long as the variations do not destroy the translocating ability of the Translocation Domain.

[0212] Particular examples of viral (reference) Translocation Domains suitable for use in the present invention include certain translocating domains of virally expressed membrane fusion proteins. For example, Wagner et al. (1992) and Murata et al. (1992) describe the translocation (i.e. membrane fusion and vesiculation) function of a number of fusogenic and amphiphilic peptides derived from the N-terminal region of influenza virus haemagglutinin. Other virally expressed membrane fusion proteins known to have the desired translocating activity are a translocating domain of a fusogenic peptide of Semliki Forest Virus (SFV), a translocating domain of vesicular stomatitis virus (VSV) glycoprotein G, a translocating domain of SER virus F protein and a translocating domain of Foamy virus envelope glycoprotein. Virally encoded Aspike proteins have particular application in the context of the present invention, for example, the E1 protein of SFV and the G protein of the G protein of VSV.

[0213] Use of the (reference) Translocation Domains listed in the table (below) includes use of sequence variants thereof. A variant may comprise one or more conservative nucleic acid substitutions and/or nucleic acid deletions or insertions, with the proviso that the variant possesses the requisite translocating function. A variant may also comprise one or more amino acid substitutions and/or amino acid deletions or insertions, so long as the variant possesses the requisite translocating function.

| Translocation | | |
|---|---|---|
| Domain source | Amino acid residues | References |
| Diphtheria toxin | 194-380 | Silverman et al., 1994, J. Biol. Chem. |
| | | 269, 22524-22532 |
| | | London E., 1992, Biochem. Biophys. |
| | | Acta., 1113, 25-51 |
| Domain II of | 405-613 | Prior et al., 1992, Biochemistry 31, 3555- |
| pseudomonas | | 3559 |
| exotoxin | | Kihara & Pastan, 1994, Bioconj Chem. 5, |
| | | 532-538 |
| Influenza virus | GLFGAIAGFIENGWE | Plank et al., 1994, J. Biol. Chem. 269, |
| haemagglutinin | GMIDGWYG (SEQ ID | 12918-12924 |
| | NO: 116), and | Wagner et al., 1992, PNAS, 89, 7934- |
| | Variants thereof | 7938 |
| | | Murata et al., 1992, Biochemistry 31, |
| | | 1986-1992 |
| Semliki Forest virus | Translocation domain | Kielian et al., 1996, J Cell Biol. 134(4), |
| fusogenic protein | | 863-872 |
| Vesicular Stomatitis | 118-139 | Yao et al., 2003, Virology 310(2), 319-332 |
| virus glycoprotein | | |
| G | | |
| SER virus F protein | Translocation domain | Seth et al., 2003, J Virol 77(11) 6520- |
| | | 6527 |
| Foamy virus | Translocation domain | Picard-Maureau et al., 2003, J Virol. |
| envelope | | 77(8), 4722-4730 |
| glycoprotein | | |

[0214] Examples of clostridial neurotoxin He domain reference sequences include:
[0215] BoNT/A—N872-L1296
[0216] BoNT/B—E859-E1291
[0217] BoNT/C1—N867-E1291
[0218] BoNT/D—S863-E1276
[0219] BoNT/E—R846-K1252
[0220] BoNT/F—K865-E1274
[0221] BoNT/G—N864-E1297
[0222] TeNT—1880-D1315

[0223] For recently-identified BoNT/X, the He domain has been reported as corresponding to amino acids 893-1306 thereof, with the domain boundary potentially varying by approximately 25 amino acids (e.g. 868-1306 or 918-1306).

[0224] The clostridial neurotoxins described herein may further comprise a translocation facilitating domain. Said domain facilitates delivery of the non-cytotoxic protease into the cytosol of the target cell and are described, for example, in WO 08/008803 and WO 08/008805, each of which is herein incorporated by reference thereto.

[0225] By way of example, suitable translocation facilitating domains include an enveloped virus fusogenic peptide domain, for example, suitable fusogenic peptide domains include influenzavirus fusogenic peptide domain (e.g. influenza A virus fusogenic peptide domain of 23 amino acids), alphavirus fusogenic peptide domain (e.g. Semliki Forest virus fusogenic peptide domain of 26 amino acids), vesiculovirus fusogenic peptide domain (e.g. vesicular stomatitis virus fusogenic peptide domain of 21 amino acids), respirovirus fusogenic peptide domain (e.g. Sendai virus fusogenic peptide domain of 25 amino acids), morbiliivirus fusogenic peptide domain (e.g. Canine distemper virus fusogenic peptide domain of 25 amino acids), avulavirus fusogenic peptide domain (e.g. Newcastle disease virus fusogenic peptide domain of 25 amino acids), henipavirus fusogenic peptide domain (e.g. Hendra virus fusogenic peptide domain of 25 amino acids), metapneumovirus fusogenic peptide domain (e.g. Human metapneumovirus fusogenic peptide domain of 25 amino acids) or spumavirus fusogenic peptide domain such as simian foamy virus fusogenic peptide domain; or fragments or variants thereof.

[0226] By way of further example, a translocation facilitating domain may comprise a clostridial neurotoxin H_{CN} domain or a fragment or variant thereof. In more detail, a clostridial neurotoxin H_{CN} translocation facilitating domain may have a length of at least 200 amino acids, at least 225 amino acids, at least 250 amino acids, at least 275 amino acids. In this regard, a clostridial neurotoxin H_{CN} translocation facilitating domain preferably has a length of at most 200 amino acids, at most 225 amino acids, at most 250 amino acids, or at most 275 amino acids. Specific (reference) examples include:
[0227] Botulinum type A neurotoxin—amino acid residues (872-1110)
[0228] Botulinum type B neurotoxin—amino acid residues (859-1097)
[0229] Botulinum type C neurotoxin—amino acid residues (867-1111)
[0230] Botulinum type D neurotoxin—amino acid residues (863-1098)
[0231] Botulinum type E neurotoxin—amino acid residues (846-1085)
[0232] Botulinum type F neurotoxin—amino acid residues (865-1105)
[0233] Botulinum type G neurotoxin—amino acid residues (864-1105)
[0234] Tetanus neurotoxin—amino acid residues (880-1127)

[0235] The above sequence positions may vary a little according to serotype/sub-type, and further examples of suitable (reference) clostridial neurotoxin H_{CN} domains include:
[0236] Botulinum type A neurotoxin—amino acid residues (874-1110)
[0237] Botulinum type B neurotoxin—amino acid residues (861-1097)
[0238] Botulinum type C neurotoxin—amino acid residues (869-1111)
[0239] Botulinum type D neurotoxin—amino acid residues (865-1098)
[0240] Botulinum type E neurotoxin—amino acid residues (848-1085)
[0241] Botulinum type F neurotoxin—amino acid residues (867-1105)
[0242] Botulinum type G neurotoxin—amino acid residues (866-1105)
[0243] Tetanus neurotoxin—amino acid residues (882-1127)

[0244] Any of the above-described facilitating domains may be combined with any of the previously described translocation domain peptides that are suitable for use in the present invention. Thus, by way of example, a non-clostridial facilitating domain may be combined with non-clostridial translocation domain peptide or with clostridial translocation domain peptide. Alternatively, a clostridial neurotoxin H_{CN} translocation facilitating domain may be combined with a non-clostridial translocation domain peptide. Alternatively, a clostridial neurotoxin H_{CN} facilitating domain may be combined or with a clostridial translocation domain peptide, examples of which include:
[0245] Botulinum type A neurotoxin—amino acid residues (449-1110)
[0246] Botulinum type B neurotoxin—amino acid residues (442-1097)
[0247] Botulinum type C neurotoxin—amino acid residues (450-1111)
[0248] Botulinum type D neurotoxin—amino acid residues (446-1098)
[0249] Botulinum type E neurotoxin—amino acid residues (423-1085)
[0250] Botulinum type F neurotoxin—amino acid residues (440-1105)
[0251] Botulinum type G neurotoxin—amino acid residues (447-1105)
[0252] Tetanus neurotoxin—amino acid residues (458-1127)

[0253] The He peptide of a native clostridial neurotoxin comprises approximately 400-440 amino acid residues, and consists of two functionally distinct domains of approximately 25 kDa each, namely the N-terminal region (commonly referred to as the H_{CN} peptide or domain) and the C-terminal region (commonly referred to as the H_{cc} peptide or domain). This fact is confirmed by the following publications, each of which is herein incorporated in its entirety by reference thereto: Umland T C (1997) Nat. Struct. Biol. 4: 788-792; Herreros J (2000) Biochem. J. 347: 199-204; Halpern J (1993) J. Biol. Chem. 268: 15, pp. 11188-11192; Rummel A (2007) PNAS 104: 359-364; Lacey DB (1998) Nat. Struct. Biol. 5: 898-902; Knapp (1998) Am. Cryst. Assoc. Abstract Papers 25: 90; Swaminathan and Eswaramoorthy (2000) Nat. Struct. Biol. 7: 1751-1759; and Rummel A (2004) Mol. Microbiol. 51(3), 631-643. Moreover, it has been well documented that the C-terminal region (H_{cc}), which constitutes the C-terminal 160-200 amino acid residues, is responsible for binding of a clostridial neurotoxin to its natural cell receptors, namely to nerve terminals at the neuromuscular junction—this fact is also confirmed by the above publications.

[0254] Example clostridial H_{cc} reference sequences are presented below:
[0255] Botulinum type A neurotoxin—amino acid residues (Y1111-L1296)
[0256] Botulinum type B neurotoxin—amino acid residues (Y1098-E1291)
[0257] Botulinum type C neurotoxin—amino acid residues (Y1112-E1291)
[0258] Botulinum type D neurotoxin—amino acid residues (Y1099-E1276)
[0259] Botulinum type E neurotoxin—amino acid residues (Y1086-K1252)
[0260] Botulinum type F neurotoxin—amino acid residues (Y1106-E1274)
[0261] Botulinum type G neurotoxin—amino acid residues (Y1106-E1297)
[0262] Tetanus neurotoxin—amino acid residues (Y1128-D1315).

[0263] The above-identified reference sequences should be considered a guide as slight variations may occur according to sub-serotypes.

[0264] A modified clostridial neurotoxin may have one or more further modifications in the amino acid sequence of the light chain, for example modifications in the substrate binding or catalytic domain which may alter or modify the SNARE protein specificity of the modified L-chain. Examples of such modified clostridial neurotoxins are described in WO 2010/120766 and US 2011/0318385, both of which are hereby incorporated by reference in their entirety.

[0265] A modified clostridial neurotoxin may comprise one or more further modifications that increases or decreases the biological activity and/or the biological persistence of the modified clostridial neurotoxin. For example, a modified clostridial neurotoxin may comprise a leucine- or tyrosine-based motif, wherein said motif increases or decreases the biological activity and/or the biological persistence of the modified clostridial neurotoxin. Suitable leucine-based motifs include xDxxxLL (SEQ ID NO: 117), xExxxLL (SEQ ID NO: 118), xExxxlL (SEQ ID NO: 119), and xExxxLM (SEQ ID NO: 120) (wherein x is any amino acid). Suitable tyrosine-based motifs include Y-x-x-Hy (SEQ ID NO: 121) (wherein Hy is a hydrophobic amino acid). Examples of modified clostridial neurotoxins comprising leucine- and tyrosine-based motifs are described in WO 2002/08268, which is hereby incorporated by reference in its entirety.

[0266] While it is preferred that a modified clostridial neurotoxin of the invention is a modified BoNT/A, the present invention is suitable for application to many different varieties of clostridial neurotoxins with the proviso that said clostridial neurotoxin comprises a modified BoNT/A H_{cc} domain of the invention (this proviso is, however, not essential in respect of the method for selecting an oxidation resistant clostridial neurotoxin, as discussed below). Thus, in the context of the present invention, the term “clostridial neurotoxin” embraces toxins produced by C. botulinum (botulinum neurotoxin serotypes A, B, C1, D, E, F, G, H, and X), C. tetani (tetanus neurotoxin), C. butyricum (botulinum neurotoxin serotype E), and C. baratii (botulinum neurotoxin serotype F), as well as modified clostridial neurotoxins or derivatives derived from any of the foregoing, with the proviso that said clostridial neurotoxin comprises a modified BoNT/A H_{cc} domain of the invention (this proviso is, however, not essential in respect of the method for selecting an oxidation resistant clostridial neurotoxin, as discussed below). The term “clostridial neurotoxin” also embraces botulinum neurotoxin serotype H with the proviso that said clostridial neurotoxin comprises a modified BoNT/A H_{cc} domain of the invention (this proviso is, however, not essential in respect of the method for selecting an oxidation resistant clostridial neurotoxin, as discussed below).

[0267] Thus, the term “clostridial neurotoxin” is intended to embrace hybrid and chimeric clostridial neurotoxins. In one embodiment a modified clostridial neurotoxin may be a hybrid or chimeric clostridial neurotoxin with the proviso that said clostridial neurotoxin comprises a modified BoNT/A H_{cc} domain of the invention (again, this proviso is not essential in respect of the method for selecting an oxidation resistant clostridial neurotoxin, as discussed below). A hybrid clostridial neurotoxin comprises at least a portion of a light chain from one clostridial neurotoxin or subtype thereof, and at least a portion of a heavy chain from another clostridial neurotoxin or clostridial neurotoxin subtype. In one embodiment the hybrid clostridial neurotoxin may contain the entire light chain from one clostridial neurotoxin subtype and the heavy chain from another clostridial neurotoxin subtype. In another embodiment, a chimeric clostridial neurotoxin may contain a portion (e.g. the binding domain) of the heavy chain of one clostridial neurotoxin subtype, with another portion of the heavy chain being from another clostridial neurotoxin subtype. Similarly or alternatively, the therapeutic element may comprise light chain portions from different clostridial neurotoxins. Such hybrid or chimeric clostridial neurotoxins are useful, for example, as a means of delivering the therapeutic benefits of such clostridial neurotoxins to patients who are immunologically resistant to a given clostridial neurotoxin subtype, to patients who may have a lower than average concentration of receptors to a given clostridial neurotoxin heavy chain binding domain, or to patients who may have a protease-resistant variant of the membrane or vesicle toxin substrate (e.g., SNAP-25, VAMP and syntaxin). Hybrid and chimeric clostridial neurotoxins are described in U.S. Pat. No. 8,071,110, which publication is hereby incorporated by reference in its entirety.

[0268] Botulinum neurotoxin (BoNT) is produced by C. botulinum in the form of a large protein complex, consisting of BoNT itself complexed to a number of accessory proteins. There are at present nine different classes of botulinum neurotoxin, namely: botulinum neurotoxin serotypes A, B, C1, D, E, F, G, H, and X all of which share similar structures and modes of action. Different BoNT serotypes can be distinguished based on inactivation by specific neutralising anti-sera, with such classification by serotype correlating with percentage sequence identity at the amino acid level. BoNT proteins of a given serotype are further divided into different subtypes on the basis of amino acid percentage sequence identity.

[0269] Unmodified BoNT/A polypeptide sequences (including unmodified BoNT/A1, BoNT/A3, and BoNT/A4) are described above.

[0270] A BoNT/B may comprise a polypeptide sequence having at least 70% sequence identity to SEQ ID NO: 128. For example, a BoNT/B may comprise a polypeptide sequence having at least 80%, 90%, 95%, or 98% sequence identity to SEQ ID NO: 128. Preferably BoNT/B comprises (or consists of) SEQ ID NO: 128.

[0271] A BoNT/C1 may comprise a polypeptide sequence having at least 70% sequence identity to SEQ ID NO: 129. For example, a BoNT/C1 may comprise a polypeptide sequence having at least 80%, 90%, 95%, or 98% sequence identity to SEQ ID NO: 129. Preferably BoNT/C1 comprises (or consists of) SEQ ID NO: 129.

[0272] A BoNT/D may comprise a polypeptide sequence having at least 70% sequence identity to SEQ ID NO: 130. For example, a BoNT/D may comprise a polypeptide sequence having at least 80%, 90%, 95%, or 98% sequence identity to SEQ ID NO: 130. Preferably BoNT/D comprises (or consists of) SEQ ID NO: 130.

[0273] A BoNT/E may comprise a polypeptide sequence having at least 70% sequence identity to SEQ ID NO: 131. For example, a BoNT/E may comprise a polypeptide sequence having at least 80%, 90%, 95%, or 98% sequence identity to SEQ ID NO: 131. Preferably BoNT/E comprises (or consists of) SEQ ID NO: 131.

[0274] A BoNT/F may comprise a polypeptide sequence having at least 70% sequence identity to SEQ ID NO: 132. For example, a BoNT/F may comprise a polypeptide sequence having at least 80%, 90%, 95%, or 98% sequence identity to SEQ ID NO: 132. Preferably BoNT/F comprises (or consists of) SEQ ID NO: 132.

[0275] A BoNT/G may comprise a polypeptide sequence having at least 70% sequence identity to SEQ ID NO: 133. For example, a BoNT/G may comprise a polypeptide sequence having at least 80%, 90%, 95%, or 98% sequence identity to SEQ ID NO: 133. Preferably BoNT/G comprises (or consists of) SEQ ID NO: 133.

[0276] A TeNT may comprise a polypeptide sequence having at least 70% sequence identity to SEQ ID NO: 134. For example, a TeNT may comprise a polypeptide sequence having at least 80%, 90%, 95%, or 98% sequence identity to SEQ ID NO: 134. Preferably TeNT comprises (or consists of) SEQ ID NO: 134.

[0277] A BoNT/X may comprise a polypeptide sequence having at least 70% sequence identity to SEQ ID NO: 135. For example, a BoNT/X may comprise a polypeptide sequence having at least 80%, 90%, 95%, or 98% sequence identity to SEQ ID NO: 135. Preferably BoNT/X comprises (or consists of) SEQ ID NO: 135.

[0278] BoNTs are absorbed in the gastrointestinal tract, and, after entering the general circulation, bind to the presynaptic membrane of cholinergic nerve terminals and prevent the release of their neurotransmitter acetylcholine. BoNT/B, BoNT/D, BoNT/F and BoNT/G cleave synaptobrevin/vesicle-associated membrane protein (VAMP); BoNT/C1, BoNT/A and BoNT/E cleave the synaptosomal-associated protein of 25 kDa (SNAP-25); and BoNT/C1 cleaves syntaxin. BoNT/X has been found to cleave SNAP-25, VAMP1, VAMP2, VAMP3, VAMP4, VAMP5, Ykt6, and syntaxin 1.

[0279] Tetanus toxin is produced in a single serotype by C. tetani. C. butyricum produces BoNT/E, while C. baratii produces BoNT/F.

[0280] The term “clostridial neurotoxin” may also embrace newly discovered botulinum neurotoxin protein family members expressed by non-clostridial microorganisms, such as the Enterococcus encoded toxin which has closest sequence identity to BoNT/X, the Weissella oryzae encoded toxin called BoNT/Wo (NCBI Ref Seq: WP_027699549.1), which cleaves VAMP2 at W89-W90, the Enterococcus faecium encoded toxin (GenBank: OTO2244.1), which cleaves VAMP2 and SNAP25, and the Chryseobacterium pipero encoded toxin (NCBI Ref.Seq: WP_034687872.1), with the proviso that said clostridial neurotoxin comprises a modified BoNT/A H_{cc} domain of the invention (again, this proviso is not essential in respect of the method for selecting an oxidation resistant clostridial neurotoxin, as discussed below).

[0281] A modified clostridial neurotoxin of the invention may comprise a BoNT/A H_{cc} domain modified as described herein and:
[0282] (i) a BoNT/A L-chain and/or a BoNT/A H_{N} domain (preferably a BoNT/A L-chain and a BoNT/A H_{N} domain);
[0283] (ii) a BoNT/B L-chain and/or a BoNT/B H_{N} domain (preferably a BoNT/B L-chain and a BoNT/B H_{N} domain);
[0284] (iii) a BoNT/C1 L-chain and/or a BoNT/C1 H_{N} domain (preferably a BoNT/C1 L-chain and a BoNT/C1 H_{N} domain);
[0285] (iv) a BoNT/D L-chain and/or a BoNT/D H_{N} domain (preferably a BoNT/D L-chain and a BoNT/D H_{N} domain);
[0286] (v) a BoNT/E L-chain and/or a BoNT/E H_{N} domain (preferably a BoNT/E L-chain and a BoNT/E H_{N} domain);
[0287] (vi) a BoNT/F L-chain and/or a BoNT/F H_{N} domain (preferably a BoNT/F L-chain and a BoNT/F H_{N} domain);
[0288] (iv) a BoNT/G L-chain and/or a BoNT/G H_{N} domain (preferably a BoNT/G L-chain and a BoNT/G H_{N} domain);
[0289] (iv) a BoNT/X L-chain and/or a BoNT/X H_{N} domain (preferably a BoNT/X L-chain and a BoNT/X H_{N} domain); or
[0290] (iv) a TeNT L-chain and/or a TeNT H_{N} domain (preferably a TeNT L-chain and a TeNT H_{N} domain).

[0291] The modified clostridial neurotoxin preferably comprises a BoNT/A He domain comprising the BoNT/A H_{cc} domain modified as described herein. The BoNT/A H_{cc} domain modified as described herein may replace the native BoNT/A He domain. The BoNT/A He domain may be from the same or different (preferably the same) BoNT/A sub-serotype (e.g. BoNT/A1, BoNT/A3 or BoNT/A4) as the H_{cc} domain. This is preferred when the modified clostridial neurotoxin comprises a BoNT/A L-chain and/or H_{N} domain as described above.

[0292] Alternatively, the modified clostridial neurotoxin may comprise a BoNT/B, BoNT/C1, BoNT/D, BoNT/E, BoNT/F, BoNT/G, BoNT/X, or TeNT He domain in which the H_{cc} domain thereof has been replaced with the BoNT/A H_{cc} domain modified as described herein. This is preferred when the modified clostridial neurotoxin comprises a BoNT/B, BoNT/C1, BoNT/D, BoNT/E, BoNT/F, BoNT/G, BoNT/X, or TeNT L-chain and/or H_{N} domain as described above.

[0293] The present invention also embraces clostridial neurotoxins that have a non-native protease cleavage site. In such clostridial neurotoxins, the native protease cleavage site (also known as the activation site, as described above) is modified or replaced with a protease cleavage site that is not native to that clostridial neurotoxin (i.e. an exogenous cleavage site). Such a site will require an exogenous protease for cleavage, which allows for improved control over the timing and location of cleavage events. Non-native protease cleavage sites that may be employed in clostridial neurotoxins include:

| | |
|---|---|
| TEV(Tobacco Etch | (ENLYFQ↓G)(SEQ ID NO: 122) |
| virus) | |
| Thrombin | (LVPR↓GS)(SEQ ID NO: 123) |
| PreScission | (LEVLFQ↓GP)(SEQ ID NO: 124). |
| Enterokinase | (DDDDK↓, SEQ ID NO: 125) |
| Factor Xa | (IEGR↓/IDGR↓, SEQ ID NOs: |
| | 126 and 127) |

[0294] Additional protease cleavage sites include recognition sequences that are cleaved by a non-cytotoxic protease, for example by the light chain of a clostridial neurotoxin. These include the SNARE (e.g. SNAP-25, syntaxin, VAMP) protein recognition sequences that are cleaved by non-cytotoxic proteases such as the light chain of a clostridial neurotoxin. Clostridial neurotoxins comprising non-native protease cleavage sites are described in U.S. Pat. No. 7,132,259, EP 1206554-B2 and US 2007/0166332, all of which are hereby incorporated by reference in their entirety. Also embraced by the term protease cleavage site is an intein, which is a self-cleaving sequence. The self-splicing reaction is controllable, for example by varying the concentration of reducing agent present.

[0295] Alternatively/additionally, a modified clostridial neurotoxin may comprise an (exogenous) activation loop as described in WO 2020/065336 A1.

[0296] The present invention also embraces clostridial neurotoxins comprising a “destructive cleavage site”. In said clostridial neurotoxins, a non-native protease cleavage site is incorporated into the clostridial neurotoxin, at a location chosen such that cleavage at said site will decrease the activity of, or inactivate, the clostridial neurotoxin. The destructive protease cleavage site can be susceptible to cleavage by a local protease, in the event that the clostridial neurotoxin, following administration, migrates to a non-target location. Suitable non-native protease cleavage sites include those described above. Clostridial neurotoxins comprising a destructive cleavage site are described in WO 2010/094905 and WO 2002/044199, both of which are hereby incorporated by reference in their entirety.

[0297] The modified clostridial neurotoxins of the present invention, especially the light chain component thereof, may be PEGylated—this may help to increase stability, for example duration of action of the light chain component. PEGylation is particularly preferred when the light chain comprises a BoNT/A, B or C1 protease. PEGylation preferably includes the addition of PEG to the N-terminus of the light chain component. By way of example, the N-terminus of a light chain may be extended with one or more amino acid (e.g. cysteine) residues, which may be the same or different. One or more of said amino acid residues may have its own PEG molecule attached (e.g. covalently attached) thereto. An example of this technology is described in WO2007/104567, which is hereby incorporated by reference in its entirety.

[0298] A modified clostridial neurotoxin of the present invention suitably finds utility in medicine or in cosmetics. In use, the modified clostridial neurotoxin is preferably in a di-chain form. Thus, in one aspect, the invention provides a modified clostridial neurotoxin according to the invention or a di-chain modified clostridial neurotoxin according to the invention for use in medicine. Similarly, the invention is directed to a method of treatment comprising administering a modified clostridial neurotoxin or di-chain modified clostridial neurotoxin of the invention to a subject in need thereof.

[0299] A “subject” as used herein may be a mammal, such as a human or other mammal. Preferably “subject” means a human subject.

[0300] The term “disorder” as used herein also encompasses a “disease”. In one embodiment the disorder is a disease.

[0301] The term “treat” or “treating” as used herein encompasses prophylactic treatment (e.g. to prevent onset of a disorder) as well as corrective treatment (treatment of a subject already suffering from a disorder). Preferably “treat” or “treating” as used herein means corrective treatment. The term “treat” or “treating” as used herein refers to the disorder and/or a symptom thereof.

[0302] Therefore a polypeptide of the invention may be administered to a subject in a therapeutically effective amount or a prophylactically effective amount. Preferably a modified clostridial neurotoxin of the invention is administered to a subject in a therapeutically effective amount.

[0303] A “therapeutically effective amount” is any amount of the modified clostridial neurotoxin, which when administered alone or in combination to a subject for treating said disorder (or a symptom thereof) is sufficient to effect such treatment of the disorder, or symptom thereof.

[0304] A “prophylactically effective amount” is any amount of the modified clostridial neurotoxin that, when administered alone or in combination to a subject inhibits or delays the onset or reoccurrence of a disorder (or a symptom thereof). In some embodiments, the prophylactically effective amount prevents the onset or reoccurrence of a disorder entirely. “Inhibiting” the onset means either lessening the likelihood of a disorder's onset (or symptom thereof), or preventing the onset entirely.

[0305] The dosage ranges for administration of the modified clostridial neurotoxins of the present invention are those to produce the desired therapeutic, cosmetic or prophylactic effect. It will be appreciated that the dosage range required depends on the precise nature of the modified clostridial neurotoxin or composition, the route of administration, the nature of the formulation, the age of the patient, the nature, extent or severity of the patient's condition, contraindications, if any, and the judgement of the attending physician. Variations in these dosage levels can be adjusted using standard empirical routines for optimisation.

[0306] Suitable daily dosages (per kg weight of patient) are in the range 0.0001-1 ng/kg, preferably 0.0001-0.5 ng/kg, more preferably 0.002-0.5 ng/kg, and particularly preferably 0.004-0.5 ng/kg.

[0307] The unit dosage can vary from less than 1 picogram to 30 ng, but typically will be in the region of 0.01 to 1 ng per dose, which may be administered daily or preferably less frequently, such as weekly or six monthly.

[0308] A particularly preferred dosing regimen is based on 0.05 ng of modified clostridial neurotoxin as the 1× dose. In this regard, preferred dosages are in the range 1×-100× (i.e. 0.05-5 ng).

[0309] In one aspect, the present invention provides a modified clostridial neurotoxin or di-chain modified clostridial neurotoxin as described above, for use in treating a disorder selected from: a condition associated with unwanted immune secretion, strabismus, blepharospasm, squint, dystonia (e.g. spasmodic dystonia, oromandibular dystonia, focal dystonia, tardive dystonia, laryngeal dystonia, limb dystonia, cervical dystonia), torticollis (e.g. spasmodic torticollis), beauty therapy (cosmetic) applications benefiting from cell/muscle incapacitation (via SNARE down-regulation or inactivation), neuromuscular disorder or condition of ocular motility (e.g. concomitant strabismus, vertical strabismus, lateral rectus palsy, nystagmus, dysthyroid myopathy), writer's cramp, bruxism, Wilson's disease, tremor, tics, segmental myoclonus, spasms, spasticity due to chronic multiple sclerosis, spasticity resulting in abnormal bladder control, animus, back spasm, charley horse, tension headaches, levator pelvic syndrome, spina bifida, tardive dyskinesia, Parkinson's disease, stuttering, hemifacial spasm, eyelid disorder, cerebral palsy, focal spasticity, spasmodic colitis, neurogenic bladder, anismus, limb spasticity, anal fissure, achalasia, dysphagia, lacrimation, hyperhydrosis, excessive salivation, excessive gastrointestinal secretions, muscle pain (e.g. pain from muscle spasms), headache pain (e.g. tension headache), brow furrows, skin wrinkles, cancer, uterine disorders, uro-genital disorders, urogenital-neurological disorders, chronic neurogenic inflammation, and a smooth muscle disorder.

[0310] In a related aspect, the present invention provides a method of treating a disorder, the method comprising administering a modified clostridial neurotoxin or di-chain modified clostridial neurotoxin as described above to a subject, wherein the disorder is selected from: a condition associated with unwanted immune secretion, strabismus, blepharospasm, squint, dystonia (e.g. spasmodic dystonia, oromandibular dystonia, focal dystonia, tardive dystonia, laryngeal dystonia, limb dystonia, cervical dystonia), torticollis (e.g. spasmodic torticollis), beauty therapy (cosmetic) applications benefiting from cell/muscle incapacitation (via SNARE down-regulation or inactivation), neuromuscular disorder or condition of ocular motility (e.g. concomitant strabismus, vertical strabismus, lateral rectus palsy, nystagmus, dysthyroid myopathy), writer's cramp, bruxism, Wilson's disease, tremor, tics, segmental myoclonus, spasms, spasticity due to chronic multiple sclerosis, spasticity resulting in abnormal bladder control, animus, back spasm, charley horse, tension headaches, levator pelvic syndrome, spina bifida, tardive dyskinesia, Parkinson's disease, stuttering, hemifacial spasm, eyelid disorder, cerebral palsy, focal spasticity, spasmodic colitis, neurogenic bladder, anismus, limb spasticity, anal fissure, achalasia, dysphagia, lacrimation, hyperhydrosis, excessive salivation, excessive gastrointestinal secretions, muscle pain (e.g. pain from muscle spasms), headache pain (e.g. tension headache), brow furrows, skin wrinkles, cancer, uterine disorders, uro-genital disorders, urogenital-neurological disorders, chronic neurogenic inflammation, and a smooth muscle disorder.

[0311] In a related aspect, the present invention provides use of a modified clostridial neurotoxin or di-chain modified clostridial neurotoxin as described above in the manufacture of a medicament for treating a disorder selected from: a condition associated with unwanted immune secretion, strabismus, blepharospasm, squint, dystonia (e.g. spasmodic dystonia, oromandibular dystonia, focal dystonia, tardive dystonia, laryngeal dystonia, limb dystonia, cervical dystonia), torticollis (e.g. spasmodic torticollis), beauty therapy (cosmetic) applications benefiting from cell/muscle incapacitation (via SNARE down-regulation or inactivation), neuromuscular disorder or condition of ocular motility (e.g. concomitant strabismus, vertical strabismus, lateral rectus palsy, nystagmus, dysthyroid myopathy), writer's cramp, bruxism, Wilson's disease, tremor, tics, segmental myoclonus, spasms, spasticity due to chronic multiple sclerosis, spasticity resulting in abnormal bladder control, animus, back spasm, charley horse, tension headaches, levator pelvic syndrome, spina bifida, tardive dyskinesia, Parkinson's disease, stuttering, hemifacial spasm, eyelid disorder, cerebral palsy, focal spasticity, spasmodic colitis, neurogenic bladder, anismus, limb spasticity, anal fissure, achalasia, dysphagia, lacrimation, hyperhydrosis, excessive salivation, excessive gastrointestinal secretions, muscle pain (e.g. pain from muscle spasms), headache pain (e.g. tension headache), brow furrows, skin wrinkles, cancer, uterine disorders, uro-genital disorders, urogenital-neurological disorders, chronic neurogenic inflammation, and a smooth muscle disorder.

[0312] In one aspect the invention provides a method of cosmetic treatment, the method comprising administering a modified clostridial neurotoxin or di-chain modified clostridial neurotoxin according to the invention to a subject. The method may be directed to a beauty therapy application benefiting from cell/muscle incapacitation (via SNARE down-regulation or inactivation). Said cosmetic treatment may treat: facial lines, glabellar lines, brow furrows, skin wrinkles, intrathecal lines, forehead lines, “bunny” lines, smile irregularities, chin irregularities, platysmal bands, “marionette” lines, lip lines, crow's feet, eyebrow irregularities, frown lines, worry lines, stretch marks, wounds, accidents, bites, surgery, and/or contour deficiencies of such areas as eyes, cheeks, nose, lips, forehead, and/or neck.

[0313] In one aspect, the invention provides a pharmaceutical composition comprising a modified clostridial neurotoxin or a di-chain modified clostridial neurotoxin of the invention and a pharmaceutically acceptable carrier, excipient, adjuvant, propellant and/or salt. A modified clostridial neurotoxin may be part of a pharmaceutical composition when employed in a therapeutic or cosmetic application described herein.

[0314] The modified clostridial neurotoxins of the present invention may be formulated for oral, parenteral, continuous infusion, inhalation or topical application. Compositions suitable for injection may be in the form of solutions, suspensions or emulsions, or dry powders which are dissolved or suspended in a suitable vehicle prior to use.

[0315] In the case of a modified clostridial neurotoxin that is to be delivered locally, the modified clostridial neurotoxin may be formulated as a cream (e.g. for topical application), or for sub-dermal injection.

[0316] Local delivery means may include an aerosol, or other spray (e.g. a nebuliser). In this regard, an aerosol formulation of a modified clostridial neurotoxin enables delivery to the lungs and/or other nasal and/or bronchial or airway passages.

[0317] Modified clostridial neurotoxins of the invention may be administered to a patient by intrathecal or epidural injection in the spinal column at the level of the spinal segment involved in the innervation of an affected organ.

[0318] A preferred route of administration is via laproscopic and/or localised, particularly intramuscular, injection.

[0319] Fluid dosage forms are typically prepared utilising the modified clostridial neurotoxin and a pyrogen-free sterile vehicle. The modified clostridial neurotoxin, depending on the vehicle and concentration used, can be either dissolved or suspended in the vehicle. In preparing solutions the modified clostridial neurotoxin can be dissolved in the vehicle, the solution being made isotonic if necessary by addition of sodium chloride and sterilised by filtration through a sterile filter using aseptic techniques before filling into suitable sterile vials or ampoules and sealing.

[0320] Alternatively, if solution stability is adequate, the solution in its sealed containers may be sterilised by autoclaving. Advantageously additives such as buffering, solubilising, stabilising, preservative or bactericidal, suspending or emulsifying agents and or local anaesthetic agents may be dissolved in the vehicle.

[0321] Dry powders, which are dissolved or suspended in a suitable vehicle prior to use, may be prepared by filling pre-sterilised ingredients into a sterile container using aseptic technique in a sterile area. Alternatively the ingredients may be dissolved into suitable containers using aseptic technique in a sterile area. The product is then freeze dried and the containers are sealed aseptically.

[0322] Parenteral suspensions, suitable for intramuscular, subcutaneous or intradermal injection, are prepared in substantially the same manner, except that the sterile components are suspended in the sterile vehicle, instead of being dissolved and sterilisation cannot be accomplished by filtration. The components may be isolated in a sterile state or alternatively it may be sterilised after isolation, e.g. by gamma irradiation.

[0323] Advantageously, a suspending agent for example polyvinylpyrrolidone is included in the composition(s) to facilitate uniform distribution of the components.

[0324] Administration in accordance with the present invention may take advantage of a variety of delivery technologies including microparticle encapsulation, viral delivery systems or high-pressure aerosol impingement.

[0325] The invention also provides screening methods for selecting clostridial neurotoxins that exhibit resistance to oxidation. Thus, in one aspect, there is provided a method for selecting an oxidation resistant clostridial neurotoxin, the method comprising:
[0326] (a) identifying an oxidizable amino acid residue of a clostridial neurotoxin heavy chain or portion thereof;
[0327] (b) producing a modified clostridial neurotoxin in which said oxidizable amino acid residue has been modified;
[0328] (c) subjecting the modified clostridial neurotoxin to oxidizing conditions;
[0329] (d) determining an activity level of the modified clostridial neurotoxin;
[0330] (e) comparing the activity level determined in step (d) with the activity level of an otherwise identical clostridial neurotoxin lacking the modification, wherein the otherwise identical clostridial neurotoxin lacking the modification has been subjected to oxidizing conditions; and
[0331] (f) selecting the modified clostridial neurotoxin when the activity level is higher than the activity level of the otherwise identical clostridial neurotoxin lacking the modification; or
[0332] (g) discarding/not selecting the modified clostridial neurotoxin when the activity level is the same or lower than the activity level of the otherwise identical clostridial neurotoxin lacking the modification.

[0333] The portion of the clostridial neurotoxin heavy chain may comprise (preferably consist of) a translocation domain (H_{N} domain) or portion thereof or a receptor binding domain (Hc domain) or a portion thereof. A portion of a receptor binding domain may comprise (preferably consist of) a translocation facilitating domain (H_{CN} domain) or a C-terminal portion of the He domain (H_{cc} domain), preferably an H_{cc} domain.

[0334] Step (a) of the method may be carried out in silico by analysing the nature of one or more amino acids present in the heavy chain or portion thereof and their susceptibility to oxidation. Such analysis may include determining the extent of surface exposure of the one or more amino acids. Amino acids that are susceptible to oxidation may include methionine, cysteine, histidine, tryptophan, tyrosine, and phenylalanine. Thus, one or more of methionine, cysteine, histidine, tryptophan, tyrosine, and phenylalanine may be identified in step (a) of the method as an oxidizable amino acid.

[0335] The modification is suitably any modification described herein, such as a substitution, insertion, deletion or indel, preferably a substitution. Preferably, a modification is substitution with an amino acid that is more resistant to oxidation than the amino acid identified. The modification may be substitution with: valine, leucine, glycine, threonine, alanine, isoleucine, aspartic acid, glutamic acid, arginine, lysine, asparagine, glutamine, serine, or proline. In one embodiment the modification may be substitution with: valine, leucine, or glycine. Preferably, substitution with valine or leucine. Alternatively, the modification may be substitution with a non-natural or non-standard amino acid, such as norleucine, isovaline, α-methyl valine, cycloleucine, or allo-threonine.

[0336] The invention also provides a modified clostridial neurotoxin selected by a method of the invention, preferably wherein the modified clostridial neurotoxin is oxidation resistant (e.g. is more resistant than an otherwise identical clostridial neurotoxin lacking the modification).

[0337] The skilled person will appreciate that the method for selecting an oxidation resistant clostridial neurotoxin may utilise any clostridial neurotoxin, as described herein. For example, the clostridial neurotoxin may be a botulinum neurotoxin or tetanus neurotoxin selected from BoNT/A (such as BoNT/A1, BoNT/A2, BoNT/A3, BoNT/A4, BoNT/A5, BoNT/A6, BoNT/A7 or BoNT/A8), BoNT/B, BoNT/C1, BoNT/D, BoNT/E, BoNT/F, BoNT/G, BoNT/X, and TeNT. For example, a clostridial neurotoxin employed in said method may comprise a polypeptide sequence having at least 70% sequence identity to any one of SEQ ID NOs: 2, 11, 20, 29, 38, 46, 54 or 128-135. In one embodiment, a clostridial neurotoxin employed in said method may comprise a polypeptide sequence having at least 80%, 90%, 95%, or 98% sequence identity to any one of SEQ ID NOs: 2, 11, 20, 29, 38, 46, 54 or 128-135. Preferably, a clostridial neurotoxin employed in said method comprises (more preferably consists of) any one of SEQ ID NOs: 2, 11, 20, 29, 38, 46, 54 or 128-135.

[0338] A modified clostridial neurotoxin in which said oxidizable amino acid residue has been modified may be produced using any technique known in the art. For example, as described above, a nucleic acid encoding the (unmodified) clostridial neurotoxin may be modified using standard molecular cloning techniques, for example by site-directed mutagenesis. Alternatively, a modified gene sequence can be chemically synthesised. In one embodiment, a modified clostridial neurotoxin is produced by a method comprising:
[0339] (i) providing a first nucleic acid encoding a clostridial neurotoxin and modifying the first nucleic acid to introduce a modification at an oxidizable amino acid identified in step (a), thereby producing a second nucleic acid, wherein the modification increases oxidative resistance of the modified clostridial neurotoxin when compared to an otherwise identical clostridial neurotoxin lacking the modification; or
[0340] (ii) synthesizing a nucleic acid that encodes a modified clostridial neurotoxin that comprises a modification at an oxidizable amino acid identified in step (a), wherein the modification increases oxidative resistance of the modified clostridial neurotoxin when compared to an otherwise identical clostridial neurotoxin lacking the modification, thereby providing a synthesized nucleic acid; and
[0341] (iii) expressing the second nucleic acid or the synthesized nucleic acid, respectively, thereby producing the modified clostridial neurotoxin;
[0342] (iv) isolating the modified clostridial neurotoxin; and
[0343] (v) activating the modified clostridial neurotoxin by contacting the (single-chain) modified clostridial neurotoxin with a protease that cleaves the (single-chain) modified clostridial neurotoxin at a recognition site (cleavage site) located between the light chain and heavy chain, thereby converting the (single-chain) modified clostridial neurotoxin into a di-chain modified clostridial neurotoxin, wherein the light chain and heavy chain are joined together by a disulphide bond.

[0344] It is preferred that, when carrying out the screening methods, the clostridial neurotoxin is subjected to forced oxidation conditions, e.g. as described in the present Examples (see “Forced Oxidation Study”). Nevertheless, the specific oxidation technique employed is not essential so long as the modified clostridial neurotoxin and the otherwise identical clostridial neurotoxin lacking the modification are subjected to the same oxidation technique under the same conditions to ensure comparability.

[0345] Any suitable activity assay can be used to quantify clostridial neurotoxin activity, such as the DAS assay described herein. However, it is preferred that a cell-based activity assay is carried out as described in the present Examples. Nevertheless, the specific assay employed is not essential so long as the activity of the modified clostridial neurotoxin and the otherwise identical clostridial neurotoxin lacking the modification are determined using the same assay under the same conditions to ensure comparability.

[0346] The term “the activity level is higher” as used in the context of the method for selecting an oxidation resistant clostridial neurotoxin means that the activity level is statistically-significantly higher.

[0347] The term “the activity level is the same” as used in the context of the method for selecting an oxidation resistant clostridial neurotoxin means that the activity level is not statistically-significantly different or identical.

[0348] The term “the activity level is lower” as used in the context of the method for selecting an oxidation resistant clostridial neurotoxin means that the activity level is statistically-significantly lower.

[0349] Statistical significance can be determined using any suitable technique, such as one-way ANOVA.

[0350] In one embodiment, where an initial methionine amino acid residue or a corresponding initial codon is indicated in any of the following SEQ ID NOs herein, said residue/codon is optional.

[0351] Embodiments related to the various modified clostridial neurotoxin of the invention are intended to be applied equally to nucleic acids of the invention, methods, uses or pharmaceutical compositions, and vice versa.

### Sequence Homology

[0352] Any of a variety of sequence alignment methods can be used to determine percent identity, including, without limitation, global methods, local methods and hybrid methods, such as, e.g., segment approach methods. Protocols to determine percent identity are routine procedures within the scope of one skilled in the art. Global methods align sequences from the beginning to the end of the molecule and determine the best alignment by adding up scores of individual residue pairs and by imposing gap penalties. Non-limiting methods include, e.g., CLUSTAL W, see, e.g., Julie D. Thompson et al., CLUSTAL W: Improving the Sensitivity of Progressive Multiple Sequence Alignment Through Sequence Weighting, Position-Specific Gap Penalties and Weight Matrix Choice, 22(22) Nucleic Acids Research 4673-4680 (1994); and iterative refinement, see, e.g., Osamu Gotoh, Significant Improvement in Accuracy of Multiple Protein. Sequence Alignments by Iterative Refinement as Assessed by Reference to Structural Alignments, 264(4) J. Mol. Biol. 823-838 (1996). Local methods align sequences by identifying one or more conserved motifs shared by all of the input sequences. Non-limiting methods include, e.g., Match-box, see, e.g., Eric Depiereux and Ernest Feytmans, Match-Box: A Fundamentally New Algorithm for the Simultaneous Alignment of Several Protein Sequences, 8(5) CABIOS 501-509 (1992); Gibbs sampling, see, e.g., C. E. Lawrence et al., Detecting Subtle Sequence Signals: A Gibbs Sampling Strategy for Multiple Alignment, 262(5131) Science 208-214 (1993); Align-M, see, e.g., Ivo Van Walle et al., Align-M—A New Algorithm for Multiple Alignment of Highly Divergent Sequences, 20(9) Bioinformatics:1428-1435 (2004).

[0353] Thus, percent sequence identity is determined by conventional methods. See, for example, Altschul et al., Bull. Math. Bio. 48: 603-16, 1986 and Henikoff and Henikoff, Proc. Natl. Acad. Sci. USA 89:10915-19, 1992. Briefly, two amino acid sequences are aligned to optimize the alignment scores using a gap opening penalty of 10, a gap extension penalty of 1, and the “blosum 62” scoring matrix of Henikoff and Henikoff (ibid.) as shown below (amino acids are indicated by the standard one-letter codes); preferably this method is used to align a sequence with SEQ ID NO: 2 to define amino acid position numbering as described herein.

[0354] The “percent sequence identity” between two or more nucleic acid or amino acid sequences is a function of the number of identical positions shared by the sequences. Thus, % identity may be calculated as the number of identical nucleotides/amino acids divided by the total number of nucleotides/amino acids, multiplied by 100. Calculations of % sequence identity may also take into account the number of gaps, and the length of each gap that needs to be introduced to optimize alignment of two or more sequences. Sequence comparisons and the determination of percent identity between two or more sequences can be carried out using specific mathematical algorithms, such as BLAST, which will be familiar to a skilled person.

ALIGNMENT SCORES FOR
DETERMINING SEQUENCE IDENTITY

| | A | R | N | D | C | Q | E | G | H | I | L | K | M | F | P | S | T | W | Y | V |
|---|---|---|---|---|---|---|---|---|---|---|---|---|---|---|---|---|---|---|---|---|
| A | 4 | | | | | | | | | | | | | | | | | | | |
| R | −1 | 5 | | | | | | | | | | | | | | | | | | |
| N | −2 | 0 | 6 | | | | | | | | | | | | | | | | | |
| D | −2 | −2 | 1 | 6 | | | | | | | | | | | | | | | | |
| C | 0 | −3 | −3 | −3 | 9 | | | | | | | | | | | | | | | |
| Q | −1 | 1 | 0 | 0 | −3 | 5 | | | | | | | | | | | | | | |
| E | −1 | 0 | 0 | 2 | −4 | 2 | 5 | | | | | | | | | | | | | |
| G | 0 | −2 | 0 | −1 | −3 | −2 | −2 | 6 | | | | | | | | | | | | |
| H | −2 | 0 | 1 | −1 | −3 | 0 | 0 | −2 | 8 | | | | | | | | | | | |
| I | −1 | −3 | −3 | −3 | −1 | −3 | −3 | −4 | −3 | 4 | | | | | | | | | | |
| L | −1 | −2 | −3 | −4 | −1 | −2 | −3 | −4 | −3 | 2 | 4 | | | | | | | | | |
| K | −1 | 2 | 0 | −1 | −3 | 1 | 1 | −2 | −1 | −3 | −2 | 5 | | | | | | | | |
| M | −1 | −1 | −2 | −3 | −1 | 0 | −2 | −3 | −2 | 1 | 2 | −1 | 5 | | | | | | | |
| F | −2 | −3 | −3 | −3 | −2 | −3 | −3 | −3 | −1 | 0 | 0 | −3 | 0 | 6 | | | | | | |
| P | −1 | −2 | −2 | −1 | −3 | −1 | −1 | −2 | −2 | −3 | −3 | −1 | −2 | −4 | 7 | | | | | |
| S | 1 | −1 | 1 | 0 | −1 | 0 | 0 | 0 | −1 | −2 | −2 | 0 | −1 | −2 | −1 | 4 | | | | |
| T | 0 | −1 | 0 | −1 | −1 | −1 | −1 | −2 | −2 | −1 | −1 | −1 | −1 | −2 | −1 | 1 | 5 | | | |
| W | −3 | −3 | −4 | −4 | −2 | −2 | −3 | −2 | −2 | −3 | −2 | −3 | −1 | 1 | −4 | −3 | −2 | 11 | | |
| Y | −2 | −2 | −2 | −3 | −2 | −1 | −2 | −3 | 2 | −1 | −1 | −2 | −1 | 3 | −3 | −2 | −2 | 2 | 7 | |
| V | 0 | −3 | −3 | −3 | −1 | −2 | −2 | −3 | −3 | 3 | 1 | −2 | 1 | −1 | −2 | −2 | 0 | −3 | −1 | 4 |

[0355] The percent identity is then calculated as:

$$\frac{Total number of identical matches}{\begin{matrix}[ length of the longer sequence plus the number gaps introduced \\ into the longer sequence in order to align the two sequences ]\end{matrix}} \times 100$$

[0356] Substantially homologous polypeptides are characterized as having one or more amino acid substitutions, deletions or additions. These changes are preferably of a minor nature, that is conservative amino acid substitutions (see below) and other substitutions that do not significantly affect the folding or activity of the polypeptide; small deletions, typically of one to about 30 amino acids; and small amino- or carboxyl-terminal extensions, such as an amino-terminal methionine residue, a small linker peptide of up to about 20-25 residues, or an affinity tag.

CONSERVATIVE AMINO ACID SUBSTITUTIONS

| | |
|---|---|
| Basic: | arginine |
| | lysine |
| | histidine |
| Acidic: | glutamic acid |
| | aspartic acid |
| Polar: | glutamine |
| | asparagine |
| Hydrophobic: | leucine |
| | isoleucine |
| | valine |
| Aromatic: | phenylalanine |
| | tryptophan |
| | tyrosine |
| Small: | glycine |
| | alanine |
| | serine |
| | threonine |
| | methionine |

[0357] In addition to the 20 standard amino acids, non-standard amino acids (such as 4-hydroxyproline, 6-N-methyl lysine, 2-aminoisobutyric acid, isovaline and α-methyl serine) may be substituted for amino acid residues of the polypeptides of the present invention. A limited number of non-conservative amino acids, amino acids that are not encoded by the genetic code, and unnatural amino acids may be substituted for polypeptide amino acid residues. The polypeptides of the present invention can also comprise non-naturally occurring amino acid residues.

[0358] Non-naturally occurring amino acids include, without limitation, trans-3-methylproline, 2,4-methano-proline, cis-4-hydroxyproline, trans-4-hydroxy-proline, N-methylglycine, allo-threonine, methyl-threonine, hydroxy-ethylcysteine, hydroxyethylhomo-cysteine, nitro-glutamine, homoglutamine, pipecolic acid, tert-leucine, norvaline, 2-azaphenylalanine, 3-azaphenyl-alanine, 4-azaphenyl-alanine, and 4-fluorophenylalanine. Several methods are known in the art for incorporating non-naturally occurring amino acid residues into proteins. For example, an in vitro system can be employed wherein nonsense mutations are suppressed using chemically aminoacylated suppressor tRNAs. Methods for synthesizing amino acids and aminoacylating tRNA are known in the art. Transcription and translation of plasmids containing nonsense mutations is carried out in a cell free system comprising an E. coli S30 extract and commercially available enzymes and other reagents. Proteins are purified by chromatography. See, for example, Robertson et al., J. Am. Chem. Soc. 113:2722, 1991; Ellman et al., Methods Enzymol. 202:301, 1991; Chung et al., Science 259:806-9, 1993; and Chung et al., Proc. Natl. Acad. Sci. USA 90:10145-9, 1993). In a second method, translation is carried out in Xenopus oocytes by microinjection of mutated mRNA and chemically aminoacylated suppressor tRNAs (Turcatti et al., J. Biol. Chem. 271:19991-8, 1996). Within a third method, E. coli cells are cultured in the absence of a natural amino acid that is to be replaced (e.g., phenylalanine) and in the presence of the desired non-naturally occurring amino acid(s) (e.g., 2-azaphenylalanine, 3-azaphenylalanine, 4-azaphenylalanine, or 4-fluorophenylalanine). The non-naturally occurring amino acid is incorporated into the polypeptide in place of its natural counterpart. See, Koide et al., Biochem. 33:7470-6, 1994. Naturally occurring amino acid residues can be converted to non-naturally occurring species by in vitro chemical modification. Chemical modification can be combined with site-directed mutagenesis to further expand the range of substitutions (Wynn and Richards, Protein Sci. 2:395-403, 1993).

[0359] A limited number of non-conservative amino acids, amino acids that are not encoded by the genetic code, non-naturally occurring amino acids, and unnatural amino acids may be substituted for amino acid residues of polypeptides of the present invention.

[0360] Essential amino acids in the polypeptides of the present invention can be identified according to procedures known in the art, such as site-directed mutagenesis or alanine-scanning mutagenesis (Cunningham and Wells, Science 244: 1081-5, 1989). Sites of biological interaction can also be determined by physical analysis of structure, as determined by such techniques as nuclear magnetic resonance, crystallography, electron diffraction or photoaffinity labeling, in conjunction with mutation of putative contact site amino acids. See, for example, de Vos et al., Science 255:306-12, 1992; Smith et al., J. Mol. Biol. 224:899-904, 1992; Wlodaver et al., FEBS Lett. 309:59-64, 1992. The identities of essential amino acids can also be inferred from analysis of homologies with related components (e.g. the translocation or protease components) of the polypeptides of the present invention.

[0361] Multiple amino acid substitutions can be made and tested using known methods of mutagenesis and screening, such as those disclosed by Reidhaar-Olson and Sauer (Science 241:53-7, 1988) or Bowie and Sauer (Proc. Natl. Acad. Sci. USA 86:2152-6, 1989). Briefly, these authors disclose methods for simultaneously randomizing two or more positions in a polypeptide, selecting for functional polypeptide, and then sequencing the mutagenized polypeptides to determine the spectrum of allowable substitutions at each position. Other methods that can be used include phage display (e.g., Lowman et al., Biochem. 30:10832-7, 1991; Ladner et al., U.S. Pat. No. 5,223,409; Huse, WIPO Publication WO 92/06204) and region-directed mutagenesis (Derbyshire et al., Gene 46:145, 1986; Ner et al., DNA 7:127, 1988).

[0362] Unless defined otherwise, all technical and scientific terms used herein have the same meaning as commonly understood by one of ordinary skill in the art to which this disclosure belongs. Singleton, et al., DICTIONARY OF MICROBIOLOGY AND MOLECULAR BIOLOGY, 20 ED., John Wiley and Sons, NewYork (1994), and Hale & Marham, THE HARPER COLLINS DICTIONARY OF BIOLOGY, Harper Perennial, NY (1991) provide the skilled person with a general dictionary of many of the terms used in this disclosure.

[0363] This disclosure is not limited by the exemplary methods and materials disclosed herein, and any methods and materials similar or equivalent to those described herein can be used in the practice or testing of embodiments of this disclosure. Numeric ranges are inclusive of the numbers defining the range. Unless otherwise indicated, any nucleic acid sequences are written left to right in 5′ to 3′ orientation; amino acid sequences are written left to right in amino to carboxy orientation, respectively.

[0364] The headings provided herein are not limitations of the various aspects or embodiments of this disclosure.

[0365] Amino acids are referred to herein using the name of the amino acid, the three letter abbreviation or the single letter abbreviation. The term “protein”, as used herein, includes proteins, polypeptides, and peptides. As used herein, the term “amino acid sequence” is synonymous with the term “polypeptide” and/or the term “protein”. In some instances, the term “amino acid sequence” is synonymous with the term “peptide”. In some instances, the term “amino acid sequence” is synonymous with the term “enzyme”. The terms “protein” and “polypeptide” are used interchangeably herein. In the present disclosure and claims, the conventional one-letter and three-letter codes for amino acid residues may be used. The 3-letter code for amino acids as defined in conformity with the IUPACIUB Joint Commission on Biochemical Nomenclature (JCBN). It is also understood that a polypeptide may be coded for by more than one nucleotide sequence due to the degeneracy of the genetic code.

[0366] Other definitions of terms may appear throughout the specification. Before the exemplary embodiments are described in more detail, it is to be understood that this disclosure is not limited to particular embodiments described, and as such may vary. It is also to be understood that the terminology used herein is for the purpose of describing particular embodiments only, and is not intended to be limiting, since the scope of the present disclosure will be defined only by the appended claims.

[0367] Where a range of values is provided, it is understood that each intervening value, to the tenth of the unit of the lower limit unless the context clearly dictates otherwise, between the upper and lower limits of that range is also specifically disclosed. Each smaller range between any stated value or intervening value in a stated range and any other stated or intervening value in that stated range is encompassed within this disclosure. The upper and lower limits of these smaller ranges may independently be included or excluded in the range, and each range where either, neither or both limits are included in the smaller ranges is also encompassed within this disclosure, subject to any specifically excluded limit in the stated range. Where the stated range includes one or both of the limits, ranges excluding either or both of those included limits are also included in this disclosure.

[0368] It must be noted that as used herein and in the appended claims, the singular forms “a”, “an”, and “the” include plural referents unless the context clearly dictates otherwise. Thus, for example, reference to “a clostridial neurotoxin” includes a plurality of such candidate agents and reference to “the clostridial neurotoxin” includes reference to one or more clostridial neurotoxins and equivalents thereof known to those skilled in the art, and so forth.

[0369] Where the term “comprises” or “comprising” is used herein, in one embodiment said term may be replaced by “consists essentially of” or “consisting essentially of”. In another embodiment said term may be replaced by “consists of” or “consisting of”.

[0370] The publications discussed herein are provided solely for their disclosure prior to the filing date of the present application. Nothing herein is to be construed as an admission that such publications constitute prior art to the claims appended hereto.

### BRIEF DESCRIPTION OF THE DRAWINGS

[0371] Embodiments of the invention will now be described, by way of example only, with reference to the following Figures and Examples.

[0372] FIG. 1 shows the % change in control BoNT/A activity over time (“Activity”) following oxidation with hydrogen peroxide, as well as the % change in the level of oxidation associated with the peptide comprising methionine residue 1144.

[0373] FIG. 2 shows the % change in control BoNT/A activity over time (“Activity”) following oxidation with hydrogen peroxide, as well as the % change in the level of oxidation associated with the peptide comprising methionine residue 1144.

[0374] FIG. 3 shows an SDS-PAGE gel of purified modified BoNT/A (M1144V) before Lys-C activation (−) and after Lys-C activation (+). Single-chain un-cleaved modified BoNT/A is shown together with the heavy chain (H-chain) and light chain (L-chain) components of di-chain modified BoNT/A. M=marker.

[0375] FIG. 4 shows the % change in modified BoNT/A activity over time (“Activity”) following oxidation with hydrogen peroxide, as well as the % change in the level of oxidation associated with the peptide comprising V1144.

[0376] FIG. 5 shows: (A) the SV2c binding ‘on’ rate for wild-type BoNT/A CLD1040 as well as BoNT/A M1144V and BoNT/A M1144L (One way ANOVA: P=0.0005 (***), P<0.0001 (****)); and (B) the SV2c binding ‘off’ rate forwild-type BoNT/A CLD1040 as well as BoNT/A M1144V and BoNT/A M1144L (One way ANOVA: P<0.0001 (****)).

### SEQUENCE LISTING

[0377] SEQ ID NO: 1—(BoNT/A1 Nucleic Acid Sequence)
[0378] SEQ ID NO: 2—(BoNT/A1 Polypeptide Sequence)
[0379] SEQ ID NO: 3—(Modified BoNT/A1 (M1144V) Polypeptide Sequence)
[0380] SEQ ID NO: 4—(Modified BoNT/A1 (M1144G) Polypeptide Sequence)
[0381] SEQ ID NO: 5—(Modified BoNT/A1 (M1144L) Polypeptide Sequence)
[0382] SEQ ID NO: 6—(Modified BoNT/A1 (M1144T) Polypeptide Sequence)
[0383] SEQ ID NO: 7—(Modified BoNT/A1 (M1144A) Polypeptide Sequence)
[0384] SEQ ID NO: 8—(Modified BoNT/A1 (M11441) Polypeptide Sequence)
[0385] SEQ ID NO: 9—(Modified BoNT/A1 (M1144 Deletion) Polypeptide Sequence)
[0386] SEQ ID NO: 10—(BoNT/A1 (N886K, N930K, S955K, Q991K, N1026K, N1052K, Q1229K) Nucleic Acid Sequence)
[0387] SEQ ID NO: 11—(BoNT/A1 (N886K, N930K, S955K, Q991K, N1026K, N1052K, Q1229K) Polypeptide Sequence)
[0388] SEQ ID NO: 12—(Modified BoNT/A1 (N886K, N930K, S955K, Q991K, N1026K, N1052K, Q1229K, M1144V) Polypeptide Sequence)
[0389] SEQ ID NO: 13—(Modified BoNT/A1 (N886K, N930K, S955K, Q991K, N1026K, N1052K, Q1229K, M1144G) Polypeptide Sequence)
[0390] SEQ ID NO: 14—(Modified BoNT/A1 (N886K, N930K, S955K, Q991K, N1026K, N1052K, Q1229K, M1144L) Polypeptide Sequence)
[0391] SEQ ID NO: 15—(Modified BoNT/A1 (N886K, N930K, S955K, Q991K, N1026K, N1052K, Q1229K, M1144T) Polypeptide Sequence)
[0392] SEQ ID NO: 16—(Modified BoNT/A1 (N886K, N930K, S955K, Q991K, N1026K, N1052K, Q1229K, M1144A) Polypeptide Sequence)
[0393] SEQ ID NO: 17—(Modified BoNT/A1 (N886K, N930K, S955K, Q991K, N1026K, N1052K, Q1229K, M11441) Polypeptide Sequence)
[0394] SEQ ID NO: 18—(Modified BoNT/A1 (N886K, N930K, S955K, Q991K, N1026K, N1052K, Q1229K, M1144 Deletion) Polypeptide Sequence)
[0395] SEQ ID NO: 19—(BoNT/A1 (N954K, N930K, S955K, Q991K, N1026K, N1052K, Q1229K) Nucleic Acid Sequence)
[0396] SEQ ID NO: 20—(BoNT/A1 (N954K, N930K, S955K, Q991K, N1026K, N1052K, Q1229K) Polypeptide Sequence)
[0397] SEQ ID NO: 21—(Modified BoNT/A1 (N954K, N930K, S955K, Q991K, N1026K, N1052K, Q1229K, M1144V) Polypeptide Sequence)
[0398] SEQ ID NO: 22—(Modified BoNT/A1 (N954K, N930K, S955K, Q991K, N1026K, N1052K, Q1229K, M1144G) Polypeptide Sequence)
[0399] SEQ ID NO: 23—(Modified BoNT/A1 (N954K, N930K, S955K, Q991K, N1026K, N1052K, Q1229K, M1144L) Polypeptide Sequence)
[0400] SEQ ID NO: 24—(Modified BoNT/A1 (N954K, N930K, S955K, Q991K, N1026K, N1052K, Q1229K, M1144T) Polypeptide Sequence)
[0401] SEQ ID NO: 25—(Modified BoNT/A1 (N954K, N930K, S955K, Q991K, N1026K, N1052K, Q1229K, M1144A) Polypeptide Sequence)
[0402] SEQ ID NO: 26—(Modified BoNT/A1 (N954K, N930K, S955K, Q991K, N1026K, N1052K, Q1229K, M11441) Polypeptide Sequence)
[0403] SEQ ID NO: 27—(Modified BoNT/A1 (N954K, N930K, S955K, Q991K, N1026K, N1052K, Q1229K, M1144 Deletion) Polypeptide Sequence)
[0404] SEQ ID NO: 28—(BoNT/A1 (N930K, S955K, Q991K, N1026K, N1052K, Q1229K, N1025K) Nucleic Acid Sequence)
[0405] SEQ ID NO: 29—(BoNT/A1 (N930K, S955K, Q991K, N1026K, N1052K, Q1229K, N1025K) Polypeptide Sequence)
[0406] SEQ ID NO: 30—(Modified BoNT/A1 (N930K, S955K, Q991K, N1026K, N1052K, Q1229K, N1025K, M1144V) Polypeptide Sequence)
[0407] SEQ ID NO: 31—(Modified BoNT/A1 (N930K, S955K, Q991K, N1026K, N1052K, Q1229K, N1025K, M1144G) Polypeptide Sequence)
[0408] SEQ ID NO: 32—(Modified BoNT/A1 (N930K, S955K, Q991K, N1026K, N1052K, Q1229K, N1025K, M1144L) Polypeptide Sequence)
[0409] SEQ ID NO: 33—(Modified BoNT/A1 (N930K, S955K, Q991K, N1026K, N1052K, Q1229K, N1025K, M1144T) Polypeptide Sequence)
[0410] SEQ ID NO: 34—(Modified BoNT/A1 (N930K, S955K, Q991K, N1026K, N1052K, Q1229K, N1025K, M1144A) Polypeptide Sequence)
[0411] SEQ ID NO: 35—(Modified BoNT/A1 (N930K, S955K, Q991K, N1026K, N1052K, Q1229K, N1025K, M11441) Polypeptide Sequence)
[0412] SEQ ID NO: 36—(Modified BoNT/A1 (N930K, S955K, Q991K, N1026K, N1052K, Q1229K, N1025K, M1144 Deletion) Polypeptide Sequence)
[0413] SEQ ID NO: 37—(BoNT/A1 (N1188R, D1213R, G1215R, N1216R, N1242R, N1243R, S1274R, T1277R) Nucleic Acid Sequence)
[0414] SEQ ID NO: 38—(BoNT/A1 (N1188R, D1213R, G1215R, N1216R, N1242R, N1243R, S1274R, T1277R) Polypeptide Sequence)
[0415] SEQ ID NO: 39—(Modified BoNT/A1 (N1188R, D1213R, G1215R, N1216R, N1242R, N1243R, S1274R, T1277R, M1144V) Polypeptide Sequence)
[0416] SEQ ID NO: 40—(Modified BoNT/A1 (N1188R, D1213R, G1215R, N1216R, N1242R, N1243R, S1274R, T1277R, M1144G) Polypeptide Sequence)
[0417] SEQ ID NO: 41—(Modified BoNT/A1 (N1188R, D1213R, G1215R, N1216R, N1242R, N1243R, S1274R, T1277R, M1144L) Polypeptide Sequence)
[0418] SEQ ID NO: 42—(Modified BoNT/A1 (N1188R, D1213R, G1215R, N1216R, N1242R, N1243R, S1274R, T1277R, M1144T) Polypeptide Sequence)
[0419] SEQ ID NO: 43—(Modified BoNT/A1 (N1188R, D1213R, G1215R, N1216R, N1242R, N1243R, S1274R, T1277R, M1144A) Polypeptide Sequence)
[0420] SEQ ID NO: 44—(Modified BoNT/A1 (N1188R, D1213R, G1215R, N1216R, N1242R, N1243R, S1274R, T1277R, M11441) Polypeptide Sequence)
[0421] SEQ ID NO: 45—(Modified BoNT/A1 (N1188R, D1213R, G1215R, N1216R, N1242R, N1243R, S1274R, T1277R, M1144 Deletion) Polypeptide Sequence)
[0422] SEQ ID NO: 46—(BoNT/A3 Polypeptide Sequence)
[0423] SEQ ID NO: 47—(Modified BoNT/A3 (M1140V) Polypeptide Sequence)
[0424] SEQ ID NO: 48—(Modified BoNT/A3 (M1140G) Polypeptide Sequence)
[0425] SEQ ID NO: 49—(Modified BoNT/A3 (M1140L) Polypeptide Sequence)
[0426] SEQ ID NO: 50—(Modified BoNT/A3 (M1140T) Polypeptide Sequence)
[0427] SEQ ID NO: 51—(Modified BoNT/A3 (M1140A) Polypeptide Sequence)
[0428] SEQ ID NO: 52—(Modified BoNT/A3 (M11401) Polypeptide Sequence)
[0429] SEQ ID NO: 53—(Modified BoNT/A3 (M1140 Deletion) Polypeptide Sequence)
[0430] SEQ ID NO: 54—(BoNT/A4 Polypeptide Sequence)
[0431] SEQ ID NO: 55—(Modified BoNT/A4 (M1144V) Polypeptide Sequence)
[0432] SEQ ID NO: 56—(Modified BoNT/A4 (M1144G) Polypeptide Sequence)
[0433] SEQ ID NO: 57—(Modified BoNT/A4 (M1144L) Polypeptide Sequence)
[0434] SEQ ID NO: 58—(Modified BoNT/A4 (M1144T) Polypeptide Sequence)
[0435] SEQ ID NO: 59—(Modified BoNT/A4 (M1144A) Polypeptide Sequence)
[0436] SEQ ID NO: 60—(Modified BoNT/A4 (M11441) Polypeptide Sequence)
[0437] SEQ ID NO: 61—(Modified BoNT/A4 (M1144 Deletion) Polypeptide Sequence)
[0438] SEQ ID NO: 62—(BoNT/A1 H_{cc} domain Polypeptide Sequence)
[0439] SEQ ID NO: 63—(Modified BoNT/A1 H_{cc} domain (M1144V) Polypeptide Sequence)
[0440] SEQ ID NO: 64—(Modified BoNT/A1 H_{cc} domain (M1144G) Polypeptide Sequence)
[0441] SEQ ID NO: 65—(Modified BoNT/A1 H_{cc} domain (M1144L) Polypeptide Sequence)
[0442] SEQ ID NO: 66—(Modified BoNT/A1 H_{cc} domain (M1144T) Polypeptide Sequence)
[0443] SEQ ID NO: 67—(Modified BoNT/A1 H_{cc} domain (M1144A) Polypeptide Sequence)
[0444] SEQ ID NO: 68—(Modified BoNT/A1 H_{cc} domain (M11441) Polypeptide Sequence)
[0445] SEQ ID NO: 69—(Modified BoNT/A1 H_{cc} domain (M1144 Deletion) Polypeptide Sequence)
[0446] SEQ ID NO: 70—(BoNT/A1 H_{cc} domain (Q1229K) Polypeptide Sequence)
[0447] SEQ ID NO: 71—(Modified BoNT/A1 H_{cc} domain (Q1229K, M1144V) Polypeptide Sequence)
[0448] SEQ ID NO: 72—(Modified BoNT/A1 H_{cc} domain (Q1229K, M1144G) Polypeptide Sequence)
[0449] SEQ ID NO: 73—(Modified BoNT/A1 H_{cc} domain (Q1229K, M1144L) Polypeptide Sequence)
[0450] SEQ ID NO: 74—(Modified BoNT/A1 H_{cc} domain (Q1229K, M1144T) Polypeptide Sequence)
[0451] SEQ ID NO: 75—(Modified BoNT/A1 H_{cc} domain (Q1229K, M1144A) Polypeptide Sequence)
[0452] SEQ ID NO: 76—(Modified BoNT/A1 H_{cc} domain (Q1229K, M11441) Polypeptide Sequence)
[0453] SEQ ID NO: 77—(Modified BoNT/A1 H_{cc} domain (Q1229K, M1144 Deletion) Polypeptide Sequence)
[0454] SEQ ID NO: 78—(BoNT/A1 H_{cc} domain (N1188R, D1213R, G1215R, N1216R, N1242R, N1243R, S1274R, T1277R) Polypeptide Sequence)
[0455] SEQ ID NO: 79—(Modified BoNT/A1 H_{cc} domain (N1188R, D1213R, G1215R, N1216R, N1242R, N1243R, S1274R, T1277R, M1144V) Polypeptide
[0456] SEQ ID NO: 80—(Modified BoNT/A1 H_{cc} domain (N1188R, D1213R, G1215R, N1216R, N1242R, N1243R, S1274R, T1277R, M1144G) Polypeptide Sequence)
[0457] SEQ ID NO: 81—(Modified BoNT/A1 H_{cc} domain (N1188R, D1213R, G1215R, N1216R, N1242R, N1243R, S1274R, T1277R, M1144L) Polypeptide Sequence)
[0458] SEQ ID NO: 82—(Modified BoNT/A1 H_{cc} domain (N1188R, D1213R, G1215R, N1216R, N1242R, N1243R, S1274R, T1277R, M1144T) Polypeptide Sequence)
[0459] SEQ ID NO: 83—(Modified BoNT/A1 H_{cc} domain (N1188R, D1213R, G1215R, N1216R, N1242R, N1243R, S1274R, T1277R, M1144A) Polypeptide Sequence)
[0460] SEQ ID NO: 84—(Modified BoNT/A1 H_{cc} domain (N1188R, D1213R, G1215R, N1216R, N1242R, N1243R, S1274R, T1277R, M11441) Polypeptide Sequence)
[0461] SEQ ID NO: 85—(Modified BoNT/A1 H_{cc} domain (N1188R, D1213R, G1215R, N1216R, N1242R, N1243R, S1274R, T1277R, M1144 Deletion) Polypeptide Sequence)
[0462] SEQ ID NO: 86—(BoNT/A3 H_{cc} domain Polypeptide Sequence)
[0463] SEQ ID NO: 87—(Modified BoNT/A3 H_{cc} domain (M1144V) Polypeptide Sequence)
[0464] SEQ ID NO: 88—(Modified BoNT/A3 H_{cc} domain (M1144G) Polypeptide Sequence)
[0465] SEQ ID NO: 89—(Modified BoNT/A3 H_{cc} domain (M1144L) Polypeptide Sequence)
[0466] SEQ ID NO: 90—(Modified BoNT/A3 H_{cc} domain (M1144T) Polypeptide Sequence)
[0467] SEQ ID NO: 91—(Modified BoNT/A3 H_{cc} domain (M1144A) Polypeptide Sequence)
[0468] SEQ ID NO: 92—(Modified BoNT/A3 H_{cc} domain (M11441) Polypeptide Sequence)
[0469] SEQ ID NO: 93—(Modified BoNT/A3 H_{cc} domain (M1144 Deletion) Polypeptide Sequence)
[0470] SEQ ID NO: 94—(BoNT/A4 H_{cc} domain Polypeptide Sequence)
[0471] SEQ ID NO: 95—(Modified BoNT/A4 H_{cc} domain (M1144V) Polypeptide Sequence)
[0472] SEQ ID NO: 96—(Modified BoNT/A4 H_{cc} domain (M1144G) Polypeptide Sequence)
[0473] SEQ ID NO: 97—(Modified BoNT/A4 H_{cc} domain (M1144L) Polypeptide Sequence)
[0474] SEQ ID NO: 98—(Modified BoNT/A4 H_{cc} domain (M1144T) Polypeptide Sequence)
[0475] SEQ ID NO: 99—(Modified BoNT/A4 H_{cc} domain (M1144A) Polypeptide Sequence)
[0476] SEQ ID NO: 100—(Modified BoNT/A4 H_{cc} domain (M11441) Polypeptide Sequence)
[0477] SEQ ID NO: 101—(Modified BoNT/A4 H_{cc} domain (M1144 Deletion) Polypeptide Sequence)
[0478] SEQ ID NO: 102—(Modified SV2 Binding Domain Consensus Sequence 1)
[0479] SEQ ID NO: 103—(BoNT/A1 Hall Str (Reference) SV2 Binding Domain)
[0480] SEQ ID NO: 104—(BoNT/A1 CDC297 SV2 Binding Domain)
[0481] SEQ ID NO: 105—(BoNT/A3 Loch Maree SV2 Binding Domain)
[0482] SEQ ID NO: 106—(BoNT/A4 SV2 Binding Domain)
[0483] SEQ ID NO: 107—(Modified SV2 Binding Domain Consensus Sequence 2)
[0484] SEQ ID NO: 108—(Modified SV2 Binding Domain Consensus Sequence 3)
[0485] SEQ ID NO: 109—(Modified SV2 Binding Domain Consensus Sequence 4)
[0486] SEQ ID NO: 110—(Modified SV2 Binding Domain Consensus Sequence 5)
[0487] SEQ ID NO: 111—(Modified SV2 Binding Domain Consensus Sequence 6)
[0488] SEQ ID NO: 112—(Modified SV2 Binding Domain A)
[0489] SEQ ID NO: 113—(Modified SV2 Binding Domain B)
[0490] SEQ ID NO: 114—(Modified SV2 Binding Domain C)
[0491] SEQ ID NO: 115—(Modified SV2 Binding Domain D)
[0492] SEQ ID NO: 116—(Influenza Virus Haemagglutinin)
[0493] SEQ ID NO: 117—(Leucine-Based Motif 1)
[0494] SEQ ID NO: 118—(Leucine-Based Motif 2)
[0495] SEQ ID NO: 119—(Leucine-Based Motif 3)
[0496] SEQ ID NO: 120—(Leucine-Based Motif 4)
[0497] SEQ ID NO: 121—(Tyrosine-based Motif)
[0498] SEQ ID NO: 122—(TEV Cleavage Site)
[0499] SEQ ID NO: 123—(Thrombin Cleavage Site)
[0500] SEQ ID NO: 124—(PreScission Cleavage Site)
[0501] SEQ ID NO: 125—(Enterokinase Cleavage Site)
[0502] SEQ ID NO: 126—(Factor Xa Cleavage Site 1)
[0503] SEQ ID NO: 127—(Factor Xa Cleavage Site 2)
[0504] SEQ ID NO: 128—(Polypeptide Sequence of BoNT/B—UniProt P10844)
[0505] SEQ ID NO: 129—(Polypeptide Sequence of BoNT/C—UniProt P18640)
[0506] SEQ ID NO: 130—(Polypeptide Sequence of BoNT/D—UniProt P19321)
[0507] SEQ ID NO: 131—(Polypeptide Sequence of BoNT/E—UniProt Q00496)
[0508] SEQ ID NO: 132—(Polypeptide Sequence of BoNT/F—UniProt A7GBG3)
[0509] SEQ ID NO: 133—(Polypeptide Sequence of BoNT/G—UniProt Q60393)
[0510] SEQ ID NO: 134—(Polypeptide Sequence of TeNT—UniProt P04958)
[0511] SEQ ID NO: 135—(Polypeptide Sequence of BoNT/X)
[0512] SEQ ID NO: 136—(Modified BoNT/A1 (M1144V) Nucleic Acid Sequence)
[0513] SEQ ID NO: 137—(Modified BoNT/A1 (M1144G) Nucleic Acid Sequence)
[0514] SEQ ID NO: 138—(Modified BoNT/A1 (M1144L) Nucleic Acid Sequence)
[0515] SEQ ID NO: 139—(Polypeptide Sequence of BoNT/A2—UniProt D3|V23)
[0516] SEQ ID NO: 140—(Polypeptide Sequence of BoNT/A5 v.1—UniProt C7BEA8)
[0517] SEQ ID NO: 141—(Polypeptide Sequence of BoNT/A5 v.2—UniProt C11PK2)
[0518] SEQ ID NO: 142—(Polypeptide Sequence of BoNT/A6—ACW83608.1, Accession #FJ981696)
[0519] SEQ ID NO: 143—(Polypeptide Sequence of BoNT/A7—GenBank: AFV13854.1, Accession #JQ954969.1)
[0520] SEQ ID NO: 144—(Polypeptide Sequence of BoNT/A8—GenBank: AJA05787.1, Accession #KM233166)

SEQ ID NO: 1
(BoNT/A1 Nucleic Acid Sequence)
ATGCCATTCGTCAACAAGCAATTCAACTACAAAGACCCAGTCAACGGCGTCGACATCGCATACATCAAGATTCCG
AACGCCGGTCAAATGCAGCCGGTTAAGGCTTTTAAGATCCACAACAAGATTTGGGTTATCCCGGAGCGTGACACC
TTCACGAACCCGGAAGAAGGCGATCTGAACCCGCCACCGGAAGCGAAGCAAGTCCCTGTCAGCTACTACGATTCG
ACGTACCTGAGCACGGATAACGAAAAAGATAACTACCTGAAAGGTGTGACCAAGCTGTTCGAACGTATCTACAGC
ACGGATCTGGGTCGCATGCTGCTGACTAGCATTGTTCGCGGTATCCCGTTCTGGGGTGGTAGCACGATTGACACC
GAACTGAAGGTTATCGACACTAACTGCATTAACGTTATTCAACCGGATGGTAGCTATCGTAGCGAAGAGCTGAAT
CTGGTCATCATTGGCCCGAGCGCAGACATTATCCAATTCGAGTGCAAGAGCTTTGGTCACGAGGTTCTGAATCTG
ACCCGCAATGGCTATGGTAGCACCCAGTACATTCGTTTTTCGCCGGATTTTACCTTCGGCTTTGAAGAGAGCCTG
GAGGTTGATACCAATCCGTTGCTGGGTGCGGGCAAATTCGCTACCGATCCGGCTGTCACGCTGGCCCATGAACTG
ATCCACGCAGGCCACCGCCTGTACGGCATTGCCATCAACCCAAACCGTGTGTTCAAGGTTAATACGAATGCATAC
TACGAGATGAGCGGCCTGGAAGTCAGCTTCGAAGAACTGCGCACCTTCGGTGGCCATGACGCTAAATTCATTGAC
AGCTTGCAAGAGAATGAGTTCCGTCTGTACTACTATAACAAATTCAAAGACATTGCAAGCACGTTGAACAAGGCC
AAAAGCATCGTTGGTACTACCGCGTCGTTGCAGTATATGAAGAATGTGTTTAAAGAGAAGTACCTGCTGTCCGAG
GATACCTCCGGCAAGTTTAGCGTTGATAAGCTGAAGTTTGACAAACTGTACAAGATGCTGACCGAGATTTACACC
GAGGACAACTTTGTGAAATTCTTCAAAGTGTTGAATCGTAAAACCTATCTGAATTTTGACAAAGCGGTTTTCAAG
ATTAACATCGTGCCGAAGGTGAACTACACCATCTATGACGGTTTTAACCTGCGTAACACCAACCTGGCGGCGAAC
TTTAACGGTCAGAATACGGAAATCAACAACATGAATTTCACGAAGTTGAAGAACTTCACGGGTCTGTTCGAGTTC
TATAAGCTGCTGTGCGTGCGCGGTATCATCACCAGCAAAACCAAAAGCCTGGACAAAGGCTACAACAAGGCGCTG
AATGACCTGTGCATTAAGGTAAACAATTGGGATCTGTTCTTTTCGCCATCCGAAGATAATTTTACCAACGACCTG
AACAAGGGTGAAGAAATCACCAGCGATACGAATATTGAAGCAGCGGAAGAGAATATCAGCCTGGATCTGATCCAG
CAGTACTATCTGACCTTTAACTTCGACAATGAACCGGAGAACATTAGCATTGAGAATCTGAGCAGCGACATTATC
GGTCAGCTGGAACTGATGCCGAATATCGAACGTTTCCCGAACGGCAAAAAGTACGAGCTGGACAAGTACACTATG
TTCCATTACCTGCGTGCACAGGAGTTTGAACACGGTAAAAGCCGTATCGCGCTGACCAACAGCGTTAACGAGGCC
CTGCTGAACCCGAGCCGTGTCTATACCTTCTTCAGCAGCGACTATGTTAAGAAAGTGAACAAAGCCACTGAGGCC
GCGATGTTCCTGGGCTGGGTGGAACAGCTGGTATATGACTTCACGGACGAGACGAGCGAAGTGAGCACTACCGAC
AAAATTGCTGATATTACCATCATTATCCCGTATATTGGTCCGGCACTGAACATTGGCAACATGCTGTACAAAGAC
GATTTTGTGGGTGCCCTGATCTTCTCCGGTGCCGTGATTCTGCTGGAGTTCATTCCGGAGATTGCGATCCCGGTG
TTGGGTACCTTCGCGCTGGTGTCCTACATCGCGAATAAGGTTCTGACGGTTCAGACCATCGATAACGCGCTGTCG
AAACGTAATGAAAAATGGGACGAGGTTTACAAATACATTGTTACGAATTGGCTGGCGAAAGTCAATACCCAGATC
GACCTGATCCGTAAGAAAATGAAAGAGGCGCTGGAGAATCAGGCGGAGGCCACCAAAGCAATTATCAACTACCAA
TACAACCAGTACACGGAAGAAGAGAAGAATAACATTAACTTCAATATCGATGATTTGAGCAGCAAGCTGAATGAA
TCTATCAACAAAGCGATGATCAATATCAACAAGTTTTTGAATCAGTGTAGCGTTTCGTACCTGATGAATAGCATG
ATTCCGTATGGCGTCAAACGTCTGGAGGACTTCGACGCCAGCCTGAAAGATGCGTTGCTGAAATACATTTACGAC
AATCGTGGTACGCTGATTGGCCAAGTTGACCGCTTGAAAGACAAAGTTAACAATACCCTGAGCACCGACATCCCA
TTTCAACTGAGCAAGTATGTTGATAATCAACGTCTGTTGAGCACTTTCACCGAGTATATCAAAAACATCATCAAT
ACTAGCATTCTGAACCTGCGTTACGAGAGCAATCATCTGATTGATCTGAGCCGTTATGCAAGCAAGATCAACATC
GGTAGCAAGGTCAATTTTGACCCGATCGATAAGAACCAGATCCAGCTGTTTAATCTGGAATCGAGCAAAATTGAG
GTTATCCTGAAAAACGCCATTGTCTACAACTCCATGTACGAGAATTTCTCCACCAGCTTCTGGATTCGCATCCCG
AAATACTTCAACAGCATTAGCCTGAACAACGAGTATACTATCATCAACTGTATGGAGAACAACAGCGGTTGGAAG
GTGTCTCTGAACTATGGTGAGATCATTTGGACCTTGCAGGACACCCAAGAGATCAAGCAGCGCGTCGTGTTCAAG
TACTCTCAAATGATCAACATTTCCGATTACATTAATCGTTGGATCTTCGTGACCATTACGAATAACCGTCTGAAT
AACAGCAAGATTTACATCAATGGTCGCTTGATCGATCAGAAACCGATTAGCAACCTGGGTAATATCCACGCAAGC
AACAACATTATGTTCAAATTGGACGGTTGCCGCGATACCCATCGTTATATCTGGATCAAGTATTTCAACCTGTTT
GATAAAGAACTGAATGAGAAGGAGATCAAAGATTTGTATGACAACCAATCTAACAGCGGCATTTTGAAGGACTTC
TGGGGCGATTATCTGCAATACGATAAGCCGTACTATATGCTGAACCTGTATGATCCGAACAAATATGTGGATGTC
AATAATGTGGGTATTCGTGGTTACATGTATTTGAAGGGTCCGCGTGGCAGCGTTATGACGACCAACATTTACCTG
AACTCTAGCCTGTACCGTGGTACGAAATTCATCATTAAGAAATATGCCAGCGGCAACAAAGATAACATTGTGCGT
AATAACGATCGTGTCTACATCAACGTGGTCGTGAAGAATAAAGAGTACCGTCTGGCGACCAACGCTTCGCAGGCG
GGTGTTGAGAAAATTCTGAGCGCGTTGGAGATCCCTGATGTCGGTAATCTGAGCCAAGTCGTGGTTATGAAGAGC
AAGAACGACCAGGGTATCACTAACAAGTGCAAGATGAACCTGCAAGACAACAATGGTAACGACATCGGCTTTATT
GGTTTCCACCAGTTCAACAATATTGCTAAACTGGTAGCGAGCAATTGGTACAATCGTCAGATTGAGCGCAGCAGC
CGTACTTTGGGCTGTAGCTGGGAGTTTATCCCGGTCGATGATGGTTGGGGCGAACGTCCGCTG
SEQ ID NO: 2
(BoNT/A1 Polypeptide Sequence)
MPFVNKQFNYKDPVNGVDIAYIKIPNAGQMQPVKAFKIHNKIWVIPERDTFTNPEEGDLNPPPEAKQVPVSYYDS
TYLSTDNEKDNYLKGVTKLFERIYSTDLGRMLLTSIVRGIPFWGGSTIDTELKVIDTNCINVIQPDGSYRSEELN
LVIIGPSADIIQFECKSFGHEVLNLTRNGYGSTQYIRFSPDFTFGFEESLEVDTNPLLGAGKFATDPAVTLAHEL
IHAGHRLYGIAINPNRVFKVNTNAYYEMSGLEVSFEELRTFGGHDAKFIDSLQENEFRLYYYNKFKDIASTLNKA
KSIVGTTASLQYMKNVFKEKYLLSEDTSGKFSVDKLKFDKLYKMLTEIYTEDNFVKFFKVLNRKTYLNFDKAVFK
INIVPKVNYTIYDGFNLRNTNLAANFNGQNTEINNMNFTKLKNFTGLFEFYKLLCVRGIITSKTKSLDKGYNKAL
NDLCIKVNNWDLFFSPSEDNFTNDLNKGEEITSDTNIEAAEENISLDLIQQYYLTFNFDNEPENISIENLSSDII
GQLELMPNIERFPNGKKYELDKYTMFHYLRAQEFEHGKSRIALTNSVNEALLNPSRVYTFFSSDYVKKVNKATEA
AMFLGWVEQLVYDFTDETSEVSTTDKIADITIIIPYIGPALNIGNMLYKDDFVGALIFSGAVILLEFIPEIAIPV
LGTFALVSYIANKVLTVQTIDNALSKRNEKWDEVYKYIVTNWLAKVNTQIDLIRKKMKEALENQAEATKAIINYQ
YNQYTEEEKNNINFNIDDLSSKLNESINKAMININKFLNQCSVSYLMNSMIPYGVKRLEDFDASLKDALLKYIYD
NRGTLIGQVDRLKDKVNNTLSTDIPFQLSKYVDNQRLLSTFTEYIKNIINTSILNLRYESNHLIDLSRYASKINI
GSKVNFDPIDKNQIQLFNLESSKIEVILKNAIVYNSMYENFSTSFWIRIPKYFNSISLNNEYTIINCMENNSGWK
VSLNYGEIIWTLQDTQEIKQRVVFKYSQMINISDYINRWIFVTITNNRLNNSKIYINGRLIDQKPISNLGNIHAS
NNIMFKLDGCRDTHRYIWIKYFNLFDKELNEKEIKDLYDNQSNSGILKDFWGDYLQYDKPYYMLNLYDPNKYVDV
NNVGIRGYMYLKGPRGSVMTTNIYLNSSLYRGTKFIIKKYASGNKDNIVRNNDRVYINVVVKNKEYRLATNASQA
GVEKILSALEIPDVGNLSQVVVMKSKNDQGITNKCKMNLQDNNGNDIGFIGFHQFNNIAKLVASNWYNRQIERSS
RTLGCSWEFIPVDDGWGERPL
SEQ ID NO: 3
(Modified BoNT/A1 (M1144V) Polypeptide Sequence)
MPFVNKQFNYKDPVNGVDIAYIKIPNAGQMQPVKAFKIHNKIWVIPERDTFTNPEEGDLNPPPEAKQVPVSYYDS
TYLSTDNEKDNYLKGVTKLFERIYSTDLGRMLLTSIVRGIPFWGGSTIDTELKVIDTNCINVIQPDGSYRSEELN
LVIIGPSADIIQFECKSFGHEVLNLTRNGYGSTQYIRFSPDFTFGFEESLEVDTNPLLGAGKFATDPAVTLAHEL
IHAGHRLYGIAINPNRVFKVNTNAYYEMSGLEVSFEELRTFGGHDAKFIDSLQENEFRLYYYNKFKDIASTLNKA
KSIVGTTASLQYMKNVFKEKYLLSEDTSGKFSVDKLKFDKLYKMLTEIYTEDNFVKFFKVLNRKTYLNFDKAVFK
INIVPKVNYTIYDGFNLRNTNLAANFNGQNTEINNMNFTKLKNFTGLFEFYKLLCVRGIITSKTKSLDKGYNKAL
NDLCIKVNNWDLFFSPSEDNFTNDLNKGEEITSDTNIEAAEENISLDLIQQYYLTFNFDNEPENISIENLSSDII
GQLELMPNIERFPNGKKYELDKYTMFHYLRAQEFEHGKSRIALTNSVNEALLNPSRVYTFFSSDYVKKVNKATEA
AMFLGWVEQLVYDFTDETSEVSTTDKIADITIIIPYIGPALNIGNMLYKDDFVGALIFSGAVILLEFIPEIAIPV
LGTFALVSYIANKVLTVQTIDNALSKRNEKWDEVYKYIVTNWLAKVNTQIDLIRKKMKEALENQAEATKAIINYQ
YNQYTEEEKNNINFNIDDLSSKLNESINKAMININKFLNQCSVSYLMNSMIPYGVKRLEDFDASLKDALLKYIYD
NRGTLIGQVDRLKDKVNNTLSTDIPFQLSKYVDNQRLLSTFTEYIKNIINTSILNLRYESNHLIDLSRYASKINI
GSKVNFDPIDKNQIQLFNLESSKIEVILKNAIVYNSMYENFSTSFWIRIPKYFNSISLNNEYTIINCMENNSGWK
VSLNYGEIIWTLQDTQEIKQRVVFKYSQMINISDYINRWIFVTITNNRLNNSKIYINGRLIDQKPISNLGNIHAS
NNIMFKLDGCRDTHRYIWIKYFNLFDKELNEKEIKDLYDNQSNSGILKDFWGDYLQYDKPYYMLNLYDPNKYVDV
NNVGIRGYMYLKGPRGSVVTTNIYLNSSLYRGTKFIIKKYASGNKDNIVRNNDRVYINVVVKNKEYRLATNASQA
GVEKILSALEIPDVGNLSQVVVMKSKNDQGITNKCKMNLQDNNGNDIGFIGFHQFNNIAKLVASNWYNRQIERSS
RTLGCSWEFIPVDDGWGERPL
SEQ ID NO: 4
(Modified BoNT/A1 (M1144G) Polypeptide Sequence)
MPFVNKQFNYKDPVNGVDIAYIKIPNAGQMQPVKAFKIHNKIWVIPERDTFTNPEEGDLNPPPEAKQVPVSYYDS
TYLSTDNEKDNYLKGVTKLFERIYSTDLGRMLLTSIVRGIPFWGGSTIDTELKVIDTNCINVIQPDGSYRSEELN
LVIIGPSADIIQFECKSFGHEVLNLTRNGYGSTQYIRFSPDFTFGFEESLEVDTNPLLGAGKFATDPAVTLAHEL
IHAGHRLYGIAINPNRVFKVNTNAYYEMSGLEVSFEELRTFGGHDAKFIDSLQENEFRLYYYNKFKDIASTLNKA
KSIVGTTASLQYMKNVFKEKYLLSEDTSGKFSVDKLKFDKLYKMLTEIYTEDNFVKFFKVLNRKTYLNFDKAVFK
INIVPKVNYTIYDGFNLRNTNLAANFNGQNTEINNMNFTKLKNFTGLFEFYKLLCVRGIITSKTKSLDKGYNKAL
NDLCIKVNNWDLFFSPSEDNFTNDLNKGEEITSDTNIEAAEENISLDLIQQYYLTFNFDNEPENISIENLSSDII
GQLELMPNIERFPNGKKYELDKYTMFHYLRAQEFEHGKSRIALTNSVNEALLNPSRVYTFFSSDYVKKVNKATEA
AMFLGWVEQLVYDFTDETSEVSTTDKIADITIIIPYIGPALNIGNMLYKDDFVGALIFSGAVILLEFIPEIAIPV
LGTFALVSYIANKVLTVQTIDNALSKRNEKWDEVYKYIVTNWLAKVNTQIDLIRKKMKEALENQAEATKAIINYQ
YNQYTEEEKNNINFNIDDLSSKLNESINKAMININKFLNQCSVSYLMNSMIPYGVKRLEDFDASLKDALLKYIYD
NRGTLIGQVDRLKDKVNNTLSTDIPFQLSKYVDNQRLLSTFTEYIKNIINTSILNLRYESNHLIDLSRYASKINI
GSKVNFDPIDKNQIQLFNLESSKIEVILKNAIVYNSMYENFSTSFWIRIPKYFNSISLNNEYTIINCMENNSGWK
VSLNYGEIIWTLQDTQEIKQRVVFKYSQMINISDYINRWIFVTITNNRLNNSKIYINGRLIDQKPISNLGNIHAS
NNIMFKLDGCRDTHRYIWIKYFNLFDKELNEKEIKDLYDNQSNSGILKDFWGDYLQYDKPYYMLNLYDPNKYVDV
NNVGIRGYMYLKGPRGSVGTTNIYLNSSLYRGTKFIIKKYASGNKDNIVRNNDRVYINVVVKNKEYRLATNASQA
GVEKILSALEIPDVGNLSQVVVMKSKNDQGITNKCKMNLQDNNGNDIGFIGFHQFNNIAKLVASNWYNRQIERSS
RTLGCSWEFIPVDDGWGERPL
SEQ ID NO: 5
(Modified BoNT/A1 (M1144L) Polypeptide Sequence)
MPFVNKQFNYKDPVNGVDIAYIKIPNAGQMQPVKAFKIHNKIWVIPERDTFTNPEEGDLNPPPEAKQVPVSYYDS
TYLSTDNEKDNYLKGVTKLFERIYSTDLGRMLLTSIVRGIPFWGGSTIDTELKVIDTNCINVIQPDGSYRSEELN
LVIIGPSADIIQFECKSFGHEVLNLTRNGYGSTQYIRFSPDFTFGFEESLEVDTNPLLGAGKFATDPAVTLAHEL
IHAGHRLYGIAINPNRVFKVNTNAYYEMSGLEVSFEELRTFGGHDAKFIDSLQENEFRLYYYNKFKDIASTLNKA
KSIVGTTASLQYMKNVFKEKYLLSEDTSGKFSVDKLKFDKLYKMLTEIYTEDNFVKFFKVLNRKTYLNFDKAVFK
INIVPKVNYTIYDGFNLRNTNLAANFNGQNTEINNMNFTKLKNFTGLFEFYKLLCVRGIITSKTKSLDKGYNKAL
NDLCIKVNNWDLFFSPSEDNFTNDLNKGEEITSDTNIEAAEENISLDLIQQYYLTFNFDNEPENISIENLSSDII
GQLELMPNIERFPNGKKYELDKYTMFHYLRAQEFEHGKSRIALTNSVNEALLNPSRVYTFFSSDYVKKVNKATEA
AMFLGWVEQLVYDFTDETSEVSTTDKIADITIIIPYIGPALNIGNMLYKDDFVGALIFSGAVILLEFIPEIAIPV
LGTFALVSYIANKVLTVQTIDNALSKRNEKWDEVYKYIVTNWLAKVNTQIDLIRKKMKEALENQAEATKAIINYQ
YNQYTEEEKNNINFNIDDLSSKLNESINKAMININKFLNQCSVSYLMNSMIPYGVKRLEDFDASLKDALLKYIYD
NRGTLIGQVDRLKDKVNNTLSTDIPFQLSKYVDNQRLLSTFTEYIKNIINTSILNLRYESNHLIDLSRYASKINI
GSKVNFDPIDKNQIQLFNLESSKIEVILKNAIVYNSMYENFSTSFWIRIPKYFNSISLNNEYTIINCMENNSGWK
VSLNYGEIIWTLQDTQEIKQRVVFKYSQMINISDYINRWIFVTITNNRLNNSKIYINGRLIDQKPISNLGNIHAS
NNIMFKLDGCRDTHRYIWIKYFNLFDKELNEKEIKDLYDNQSNSGILKDFWGDYLQYDKPYYMLNLYDPNKYVDV
NNVGIRGYMYLKGPRGSVLTTNIYLNSSLYRGTKFIIKKYASGNKDNIVRNNDRVYINVVVKNKEYRLATNASQA
GVEKILSALEIPDVGNLSQVVVMKSKNDQGITNKCKMNLQDNNGNDIGFIGFHQFNNIAKLVASNWYNRQIERSS
RTLGCSWEFIPVDDGWGERPL
SEQ ID NO: 6
(Modified BoNT/A1 (M1144T) Polypeptide Sequence)
MPFVNKQFNYKDPVNGVDIAYIKIPNAGQMQPVKAFKIHNKIWVIPERDTFTNPEEGDLNPPPEAKQVPVSYYDS
TYLSTDNEKDNYLKGVTKLFERIYSTDLGRMLLTSIVRGIPFWGGSTIDTELKVIDTNCINVIQPDGSYRSEELN
LVIIGPSADIIQFECKSFGHEVLNLTRNGYGSTQYIRFSPDFTFGFEESLEVDTNPLLGAGKFATDPAVTLAHEL
IHAGHRLYGIAINPNRVFKVNTNAYYEMSGLEVSFEELRTFGGHDAKFIDSLQENEFRLYYYNKFKDIASTLNKA
KSIVGTTASLQYMKNVFKEKYLLSEDTSGKFSVDKLKFDKLYKMLTEIYTEDNFVKFFKVLNRKTYLNFDKAVFK
INIVPKVNYTIYDGFNLRNTNLAANFNGQNTEINNMNFTKLKNFTGLFEFYKLLCVRGIITSKTKSLDKGYNKAL
NDLCIKVNNWDLFFSPSEDNFTNDLNKGEEITSDTNIEAAEENISLDLIQQYYLTFNFDNEPENISIENLSSDII
GQLELMPNIERFPNGKKYELDKYTMFHYLRAQEFEHGKSRIALTNSVNEALLNPSRVYTFFSSDYVKKVNKATEA
AMFLGWVEQLVYDFTDETSEVSTTDKIADITIIIPYIGPALNIGNMLYKDDFVGALIFSGAVILLEFIPEIAIPV
LGTFALVSYIANKVLTVQTIDNALSKRNEKWDEVYKYIVTNWLAKVNTQIDLIRKKMKEALENQAEATKAIINYQ
YNQYTEEEKNNINFNIDDLSSKLNESINKAMININKFLNQCSVSYLMNSMIPYGVKRLEDFDASLKDALLKYIYD
NRGTLIGQVDRLKDKVNNTLSTDIPFQLSKYVDNQRLLSTFTEYIKNIINTSILNLRYESNHLIDLSRYASKINI
GSKVNFDPIDKNQIQLFNLESSKIEVILKNAIVYNSMYENFSTSFWIRIPKYFNSISLNNEYTIINCMENNSGWK
VSLNYGEIIWTLQDTQEIKQRVVFKYSQMINISDYINRWIFVTITNNRLNNSKIYINGRLIDQKPISNLGNIHAS
NNIMFKLDGCRDTHRYIWIKYFNLFDKELNEKEIKDLYDNQSNSGILKDFWGDYLQYDKPYYMLNLYDPNKYVDV
NNVGIRGYMYLKGPRGSVTTTNIYLNSSLYRGTKFIIKKYASGNKDNIVRNNDRVYINVVVKNKEYRLATNASQA
GVEKILSALEIPDVGNLSQVVVMKSKNDQGITNKCKMNLQDNNGNDIGFIGFHQFNNIAKLVASNWYNRQIERSS
RTLGCSWEFIPVDDGWGERPL
SEQ ID NO: 7 (Modified BoNT/A1 (M1144A) Polypeptide Sequence)
MPFVNKQFNYKDPVNGVDIAYIKIPNAGQMQPVKAFKIHNKIWVIPERDTFTNPEEGDLNPPPEAKQVPVSYYDS
TYLSTDNEKDNYLKGVTKLFERIYSTDLGRMLLTSIVRGIPFWGGSTIDTELKVIDTNCINVIQPDGSYRSEELN
LVIIGPSADIIQFECKSFGHEVLNLTRNGYGSTQYIRFSPDFTFGFEESLEVDTNPLLGAGKFATDPAVTLAHEL
IHAGHRLYGIAINPNRVFKVNTNAYYEMSGLEVSFEELRTFGGHDAKFIDSLQENEFRLYYYNKFKDIASTLNKA
KSIVGTTASLQYMKNVFKEKYLLSEDTSGKFSVDKLKFDKLYKMLTEIYTEDNFVKFFKVLNRKTYLNFDKAVFK
INIVPKVNYTIYDGFNLRNTNLAANFNGQNTEINNMNFTKLKNFTGLFEFYKLLCVRGIITSKTKSLDKGYNKAL
NDLCIKVNNWDLFFSPSEDNFTNDLNKGEEITSDTNIEAAEENISLDLIQQYYLTFNFDNEPENISIENLSSDII
GQLELMPNIERFPNGKKYELDKYTMFHYLRAQEFEHGKSRIALTNSVNEALLNPSRVYTFFSSDYVKKVNKATEA
AMFLGWVEQLVYDFTDETSEVSTTDKIADITIIIPYIGPALNIGNMLYKDDFVGALIFSGAVILLEFIPEIAIPV
LGTFALVSYIANKVLTVQTIDNALSKRNEKWDEVYKYIVTNWLAKVNTQIDLIRKKMKEALENQAEATKAIINYQ
YNQYTEEEKNNINFNIDDLSSKLNESINKAMININKFLNQCSVSYLMNSMIPYGVKRLEDFDASLKDALLKYIYD
NRGTLIGQVDRLKDKVNNTLSTDIPFQLSKYVDNQRLLSTFTEYIKNIINTSILNLRYESNHLIDLSRYASKINI
GSKVNFDPIDKNQIQLFNLESSKIEVILKNAIVYNSMYENFSTSFWIRIPKYFNSISLNNEYTIINCMENNSGWK
VSLNYGEIIWTLQDTQEIKQRVVFKYSQMINISDYINRWIFVTITNNRLNNSKIYINGRLIDQKPISNLGNIHAS
NNIMFKLDGCRDTHRYIWIKYFNLFDKELNEKEIKDLYDNQSNSGILKDFWGDYLQYDKPYYMLNLYDPNKYVDV
NNVGIRGYMYLKGPRGSVATTNIYLNSSLYRGTKFIIKKYASGNKDNIVRNNDRVYINVVVKNKEYRLATNASQA
GVEKILSALEIPDVGNLSQVVVMKSKNDQGITNKCKMNLQDNNGNDIGFIGFHQFNNIAKLVASNWYNRQIERSS
RTLGCSWEFIPVDDGWGERPL
SEQ ID NO: 8
(Modified BoNT/A1 (M11441) Polypeptide Sequence)
MPFVNKQFNYKDPVNGVDIAYIKIPNAGQMQPVKAFKIHNKIWVIPERDTFTNPEEGDLNPPPEAKQVPVSYYDS
TYLSTDNEKDNYLKGVTKLFERIYSTDLGRMLLTSIVRGIPFWGGSTIDTELKVIDTNCINVIQPDGSYRSEELN
LVIIGPSADIIQFECKSFGHEVLNLTRNGYGSTQYIRFSPDFTFGFEESLEVDTNPLLGAGKFATDPAVTLAHEL
IHAGHRLYGIAINPNRVFKVNTNAYYEMSGLEVSFEELRTFGGHDAKFIDSLQENEFRLYYYNKFKDIASTLNKA
KSIVGTTASLQYMKNVFKEKYLLSEDTSGKFSVDKLKFDKLYKMLTEIYTEDNFVKFFKVLNRKTYLNFDKAVFK
INIVPKVNYTIYDGFNLRNTNLAANFNGQNTEINNMNFTKLKNFTGLFEFYKLLCVRGIITSKTKSLDKGYNKAL
NDLCIKVNNWDLFFSPSEDNFTNDLNKGEEITSDTNIEAAEENISLDLIQQYYLTFNFDNEPENISIENLSSDII
GQLELMPNIERFPNGKKYELDKYTMFHYLRAQEFEHGKSRIALTNSVNEALLNPSRVYTFFSSDYVKKVNKATEA
AMFLGWVEQLVYDFTDETSEVSTTDKIADITIIIPYIGPALNIGNMLYKDDFVGALIFSGAVILLEFIPEIAIPV
LGTFALVSYIANKVLTVQTIDNALSKRNEKWDEVYKYIVTNWLAKVNTQIDLIRKKMKEALENQAEATKAIINYQ
YNQYTEEEKNNINFNIDDLSSKLNESINKAMININKFLNQCSVSYLMNSMIPYGVKRLEDFDASLKDALLKYIYD
NRGTLIGQVDRLKDKVNNTLSTDIPFQLSKYVDNQRLLSTFTEYIKNIINTSILNLRYESNHLIDLSRYASKINI
GSKVNFDPIDKNQIQLFNLESSKIEVILKNAIVYNSMYENFSTSFWIRIPKYFNSISLNNEYTIINCMENNSGWK
VSLNYGEIIWTLQDTQEIKQRVVFKYSQMINISDYINRWIFVTITNNRLNNSKIYINGRLIDQKPISNLGNIHAS
NNIMFKLDGCRDTHRYIWIKYFNLFDKELNEKEIKDLYDNQSNSGILKDFWGDYLQYDKPYYMLNLYDPNKYVDV
NNVGIRGYMYLKGPRGSVITTNIYLNSSLYRGTKFIIKKYASGNKDNIVRNNDRVYINVVVKNKEYRLATNASQA
GVEKILSALEIPDVGNLSQVVVMKSKNDQGITNKCKMNLQDNNGNDIGFIGFHQFNNIAKLVASNWYNRQIERSS
RTLGCSWEFIPVDDGWGERPL
SEQ ID NO: 9
(Modified BoNT/A1 (M1144 Deletion) Polypeptide Sequence)
MPFVNKQFNYKDPVNGVDIAYIKIPNAGQMQPVKAFKIHNKIWVIPERDTFTNPEEGDLNPPPEAKQVPVSYYDS
TYLSTDNEKDNYLKGVTKLFERIYSTDLGRMLLTSIVRGIPFWGGSTIDTELKVIDTNCINVIQPDGSYRSEELN
LVIIGPSADIIQFECKSFGHEVLNLTRNGYGSTQYIRFSPDFTFGFEESLEVDTNPLLGAGKFATDPAVTLAHEL
IHAGHRLYGIAINPNRVFKVNTNAYYEMSGLEVSFEELRTFGGHDAKFIDSLQENEFRLYYYNKFKDIASTLNKA
KSIVGTTASLQYMKNVFKEKYLLSEDTSGKFSVDKLKFDKLYKMLTEIYTEDNFVKFFKVLNRKTYLNFDKAVFK
INIVPKVNYTIYDGFNLRNTNLAANFNGQNTEINNMNFTKLKNFTGLFEFYKLLCVRGIITSKTKSLDKGYNKAL
NDLCIKVNNWDLFFSPSEDNFTNDLNKGEEITSDTNIEAAEENISLDLIQQYYLTFNFDNEPENISIENLSSDII
GQLELMPNIERFPNGKKYELDKYTMFHYLRAQEFEHGKSRIALTNSVNEALLNPSRVYTFFSSDYVKKVNKATEA
AMFLGWVEQLVYDFTDETSEVSTTDKIADITIIIPYIGPALNIGNMLYKDDFVGALIFSGAVILLEFIPEIAIPV
LGTFALVSYIANKVLTVQTIDNALSKRNEKWDEVYKYIVTNWLAKVNTQIDLIRKKMKEALENQAEATKAIINYQ
YNQYTEEEKNNINFNIDDLSSKLNESINKAMININKFLNQCSVSYLMNSMIPYGVKRLEDFDASLKDALLKYIYD
NRGTLIGQVDRLKDKVNNTLSTDIPFQLSKYVDNQRLLSTFTEYIKNIINTSILNLRYESNHLIDLSRYASKINI
GSKVNFDPIDKNQIQLFNLESSKIEVILKNAIVYNSMYENFSTSFWIRIPKYFNSISLNNEYTIINCMENNSGWK
VSLNYGEIIWTLQDTQEIKQRVVFKYSQMINISDYINRWIFVTITNNRLNNSKIYINGRLIDQKPISNLGNIHAS
NNIMFKLDGCRDTHRYIWIKYFNLFDKELNEKEIKDLYDNQSNSGILKDFWGDYLQYDKPYYMLNLYDPNKYVDV
NNVGIRGYMYLKGPRGSVTTNIYLNSSLYRGTKFIIKKYASGNKDNIVRNNDRVYINVVVKNKEYRLATNASQAG
VEKILSALEIPDVGNLSQVVVMKSKNDQGITNKCKMNLQDNNGNDIGFIGFHQFNNIAKLVASNWYNRQIERSSR
TLGCSWEFIPVDDGWGERPL
SEQ ID NO: 10
(BoNT/A1 (N886K, N930K, S955K, Q991K, N1026K, N1052K, Q1229K)
Nucleic Acid Sequence)
ATGCCATTCGTCAACAAGCAATTCAACTACAAAGACCCAGTCAACGGCGTCGACATCGCATACATCAAGATTCCG
AACGCCGGTCAAATGCAGCCGGTTAAGGCTTTTAAGATCCACAACAAGATTTGGGTTATCCCGGAGCGTGACACC
TTCACGAACCCGGAAGAAGGCGATCTGAACCCGCCACCGGAAGCGAAGCAAGTCCCTGTCAGCTACTACGATTCG
ACGTACCTGAGCACGGATAACGAAAAAGATAACTACCTGAAAGGTGTGACCAAGCTGTTCGAACGTATCTACAGC
ACGGATCTGGGTCGCATGCTGCTGACTAGCATTGTTCGCGGTATCCCGTTCTGGGGTGGTAGCACGATTGACACC
GAACTGAAGGTTATCGACACTAACTGCATTAACGTTATTCAACCGGATGGTAGCTATCGTAGCGAAGAGCTGAAT
CTGGTCATCATTGGCCCGAGCGCAGACATTATCCAATTCGAGTGCAAGAGCTTTGGTCACGAGGTTCTGAATCTG
ACCCGCAATGGCTATGGTAGCACCCAGTACATTCGTTTTTCGCCGGATTTTACCTTCGGCTTTGAAGAGAGCCTG
GAGGTTGATACCAATCCGTTGCTGGGTGCGGGCAAATTCGCTACCGATCCGGCTGTCACGCTGGCCCATGAACTG
ATCCACGCAGGCCACCGCCTGTACGGCATTGCCATCAACCCAAACCGTGTGTTCAAGGTTAATACGAATGCATAC
TACGAGATGAGCGGCCTGGAAGTCAGCTTCGAAGAACTGCGCACCTTCGGTGGCCATGACGCTAAATTCATTGAC
AGCTTGCAAGAGAATGAGTTCCGTCTGTACTACTATAACAAATTCAAAGACATTGCAAGCACGTTGAACAAGGCC
AAAAGCATCGTTGGTACTACCGCGTCGTTGCAGTATATGAAGAATGTGTTTAAAGAGAAGTACCTGCTGTCCGAG
GATACCTCCGGCAAGTTTAGCGTTGATAAGCTGAAGTTTGACAAACTGTACAAGATGCTGACCGAGATTTACACC
GAGGACAACTTTGTGAAATTCTTCAAAGTGTTGAATCGTAAAACCTATCTGAATTTTGACAAAGCGGTTTTCAAG
ATTAACATCGTGCCGAAGGTGAACTACACCATCTATGACGGTTTTAACCTGCGTAACACCAACCTGGCGGCGAAC
TTTAACGGTCAGAATACGGAAATCAACAACATGAATTTCACGAAGTTGAAGAACTTCACGGGTCTGTTCGAGTTC
TATAAGCTGCTGTGCGTGCGCGGTATCATCACCAGCAAAACCAAAAGCCTGGACAAAGGCTACAACAAGGCGCTG
AATGACCTGTGCATTAAGGTAAACAATTGGGATCTGTTCTTTTCGCCATCCGAAGATAATTTTACCAACGACCTG
AACAAGGGTGAAGAAATCACCAGCGATACGAATATTGAAGCAGCGGAAGAGAATATCAGCCTGGATCTGATCCAG
CAGTACTATCTGACCTTTAACTTCGACAATGAACCGGAGAACATTAGCATTGAGAATCTGAGCAGCGACATTATC
GGTCAGCTGGAACTGATGCCGAATATCGAACGTTTCCCGAACGGCAAAAAGTACGAGCTGGACAAGTACACTATG
TTCCATTACCTGCGTGCACAGGAGTTTGAACACGGTAAAAGCCGTATCGCGCTGACCAACAGCGTTAACGAGGCC
CTGCTGAACCCGAGCCGTGTCTATACCTTCTTCAGCAGCGACTATGTTAAGAAAGTGAACAAAGCCACTGAGGCC
GCGATGTTCCTGGGCTGGGTGGAACAGCTGGTATATGACTTCACGGACGAGACGAGCGAAGTGAGCACTACCGAC
AAAATTGCTGATATTACCATCATTATCCCGTATATTGGTCCGGCACTGAACATTGGCAACATGCTGTACAAAGAC
GATTTTGTGGGTGCCCTGATCTTCTCCGGTGCCGTGATTCTGCTGGAGTTCATTCCGGAGATTGCGATCCCGGTG
TTGGGTACCTTCGCGCTGGTGTCCTACATCGCGAATAAGGTTCTGACGGTTCAGACCATCGATAACGCGCTGTCG
AAACGTAATGAAAAATGGGACGAGGTTTACAAATACATTGTTACGAATTGGCTGGCGAAAGTCAATACCCAGATC
GACCTGATCCGTAAGAAAATGAAAGAGGCGCTGGAGAATCAGGCGGAGGCCACCAAAGCAATTATCAACTACCAA
TACAACCAGTACACGGAAGAAGAGAAGAATAACATTAACTTCAATATCGATGATTTGAGCAGCAAGCTGAATGAA
TCTATCAACAAAGCGATGATCAATATCAACAAGTTTTTGAATCAGTGTAGCGTTTCGTACCTGATGAATAGCATG
ATTCCGTATGGCGTCAAACGTCTGGAGGACTTCGACGCCAGCCTGAAAGATGCGTTGCTGAAATACATTTACGAC
AATCGTGGTACGCTGATTGGCCAAGTTGACCGCTTGAAAGACAAAGTTAACAATACCCTGAGCACCGACATCCCA
TTTCAACTGAGCAAGTATGTTGATAATCAACGTCTGTTGAGCACTTTCACCGAGTATATCAAAAACATCATCAAT
ACTAGCATTCTGAACCTGCGTTACGAGAGCAAGCATCTGATTGATCTGAGCCGTTATGCTAGCAAGATCAACATC
GGTAGCAAGGTCAATTTTGACCCGATCGATAAGAACCAGATCCAGCTGTTTAATCTGGAATCGAGCAAAATTGAG
GTTATCCTGAAAAAGGCCATTGTCTACAACTCCATGTACGAGAATTTCTCCACCAGCTTCTGGATTCGCATCCCG
AAATACTTCAACAAGATTAGCCTGAACAACGAGTATACTATCATCAACTGTATGGAGAACAACAGCGGTTGGAAG
GTGTCTCTGAACTATGGTGAGATCATTTGGACCTTGCAGGACACCAAAGAGATCAAGCAGCGCGTCGTGTTCAAG
TACTCTCAAATGATCAACATTTCCGATTACATTAATCGTTGGATCTTCGTGACCATTACGAATAACCGTCTGAAT
AAGAGCAAGATTTACATCAATGGTCGCTTGATCGATCAGAAACCGATTAGCAACCTGGGTAATATCCACGCAAGC
AACAAGATTATGTTCAAATTGGACGGTTGCCGCGATACCCATCGTTATATCTGGATCAAGTATTTCAACCTGTTT
GATAAAGAACTGAATGAGAAGGAGATCAAAGATTTGTATGACAACCAATCTAACAGCGGCATTTTGAAGGACTTC
TGGGGCGATTATCTGCAATACGATAAGCCGTACTATATGCTGAACCTGTATGATCCGAACAAATATGTGGATGTC
AATAATGTGGGTATTCGTGGTTACATGTATTTGAAGGGTCCGCGTGGCAGCGTTATGACGACCAACATTTACCTG
AACTCTAGCCTGTACCGTGGTACGAAATTCATCATTAAGAAATATGCCAGCGGCAACAAAGATAACATTGTGCGT
AATAACGATCGTGTCTACATCAACGTGGTCGTGAAGAATAAAGAGTACCGTCTGGCGACCAACGCTTCGCAGGCG
GGTGTTGAGAAAATTCTGAGCGCGTTGGAGATCCCTGATGTCGGTAATCTGAGCCAAGTCGTGGTTATGAAGAGC
AAGAACGACAAGGGTATCACTAACAAGTGCAAGATGAACCTGCAAGACAACAATGGTAACGACATCGGCTTTATT
GGTTTCCACCAGTTCAACAATATTGCTAAACTGGTAGCGAGCAATTGGTACAATCGTCAGATTGAGCGCAGCAGC
CGTACTTTGGGCTGTAGCTGGGAGTTTATCCCGGTCGATGATGGTTGGGGCGAACGTCCGCTG
SEQ ID NO: 11
(BoNT/A1 (N886K, N930K, S955K, Q991K, N1026K, N1052K, Q1229K)
Polypeptide Sequence)
MPFVNKQFNYKDPVNGVDIAYIKIPNAGQMQPVKAFKIHNKIWVIPERDTFTNPEEGDLNPPPEAKQVPVSYYDS
TYLSTDNEKDNYLKGVTKLFERIYSTDLGRMLLTSIVRGIPFWGGSTIDTELKVIDTNCINVIQPDGSYRSEELN
LVIIGPSADIIQFECKSFGHEVLNLTRNGYGSTQYIRFSPDFTFGFEESLEVDTNPLLGAGKFATDPAVTLAHEL
IHAGHRLYGIAINPNRVFKVNTNAYYEMSGLEVSFEELRTFGGHDAKFIDSLQENEFRLYYYNKFKDIASTLNKA
KSIVGTTASLQYMKNVFKEKYLLSEDTSGKFSVDKLKFDKLYKMLTEIYTEDNFVKFFKVLNRKTYLNFDKAVFK
INIVPKVNYTIYDGFNLRNTNLAANFNGQNTEINNMNFTKLKNFTGLFEFYKLLCVRGIITSKTKSLDKGYNKAL
NDLCIKVNNWDLFFSPSEDNFTNDLNKGEEITSDTNIEAAEENISLDLIQQYYLTFNFDNEPENISIENLSSDII
GQLELMPNIERFPNGKKYELDKYTMFHYLRAQEFEHGKSRIALTNSVNEALLNPSRVYTFFSSDYVKKVNKATEA
AMFLGWVEQLVYDFTDETSEVSTTDKIADITIIIPYIGPALNIGNMLYKDDFVGALIFSGAVILLEFIPEIAIPV
LGTFALVSYIANKVLTVQTIDNALSKRNEKWDEVYKYIVTNWLAKVNTQIDLIRKKMKEALENQAEATKAIINYQ
YNQYTEEEKNNINFNIDDLSSKLNESINKAMININKFLNQCSVSYLMNSMIPYGVKRLEDFDASLKDALLKYIYD
NRGTLIGQVDRLKDKVNNTLSTDIPFQLSKYVDNQRLLSTFTEYIKNIINTSILNLRYESKHLIDLSRYASKINI
GSKVNFDPIDKNQIQLFNLESSKIEVILKKAIVYNSMYENFSTSFWIRIPKYFNKISLNNEYTIINCMENNSGWK
VSLNYGEIIWTLQDTKEIKQRVVFKYSQMINISDYINRWIFVTITNNRLNKSKIYINGRLIDQKPISNLGNIHAS
NKIMFKLDGCRDTHRYIWIKYFNLFDKELNEKEIKDLYDNQSNSGILKDFWGDYLQYDKPYYMLNLYDPNKYVDV
NNVGIRGYMYLKGPRGSVMTTNIYLNSSLYRGTKFIIKKYASGNKDNIVRNNDRVYINVVVKNKEYRLATNASQA
GVEKILSALEIPDVGNLSQVVVMKSKNDKGITNKCKMNLQDNNGNDIGFIGFHQFNNIAKLVASNWYNRQIERSS
RTLGCSWEFIPVDDGWGERPL
SEQ ID NO: 12 (Modified BoNT/A1 (N886K, N930K, S955K, Q991K, N1026K, N1052K,
Q1229K, M1144V) Polypeptide Sequence)
MPFVNKQFNYKDPVNGVDIAYIKIPNAGQMQPVKAFKIHNKIWVIPERDTFTNPEEGDLNPPPEAKQVPVSYYDS
TYLSTDNEKDNYLKGVTKLFERIYSTDLGRMLLTSIVRGIPFWGGSTIDTELKVIDTNCINVIQPDGSYRSEELN
LVIIGPSADIIQFECKSFGHEVLNLTRNGYGSTQYIRFSPDFTFGFEESLEVDTNPLLGAGKFATDPAVTLAHEL
IHAGHRLYGIAINPNRVFKVNTNAYYEMSGLEVSFEELRTFGGHDAKFIDSLQENEFRLYYYNKFKDIASTLNKA
KSIVGTTASLQYMKNVFKEKYLLSEDTSGKFSVDKLKFDKLYKMLTEIYTEDNFVKFFKVLNRKTYLNFDKAVFK
INIVPKVNYTIYDGFNLRNTNLAANFNGQNTEINNMNFTKLKNFTGLFEFYKLLCVRGIITSKTKSLDKGYNKAL
NDLCIKVNNWDLFFSPSEDNFTNDLNKGEEITSDTNIEAAEENISLDLIQQYYLTFNFDNEPENISIENLSSDII
GQLELMPNIERFPNGKKYELDKYTMFHYLRAQEFEHGKSRIALTNSVNEALLNPSRVYTFFSSDYVKKVNKATEA
AMFLGWVEQLVYDFTDETSEVSTTDKIADITIIIPYIGPALNIGNMLYKDDFVGALIFSGAVILLEFIPEIAIPV
LGTFALVSYIANKVLTVQTIDNALSKRNEKWDEVYKYIVTNWLAKVNTQIDLIRKKMKEALENQAEATKAIINYQ
YNQYTEEEKNNINFNIDDLSSKLNESINKAMININKFLNQCSVSYLMNSMIPYGVKRLEDFDASLKDALLKYIYD
NRGTLIGQVDRLKDKVNNTLSTDIPFQLSKYVDNQRLLSTFTEYIKNIINTSILNLRYESKHLIDLSRYASKINI
GSKVNFDPIDKNQIQLENLESSKIEVILKKAIVYNSMYENFSTSFWIRIPKYFNKISLNNEYTIINCMENNSGWK
VSLNYGEIIWTLQDTKEIKQRVVFKYSQMINISDYINRWIFVTITNNRLNKSKIYINGRLIDQKPISNLGNIHAS
NKIMFKLDGCRDTHRYIWIKYFNLFDKELNEKEIKDLYDNQSNSGILKDFWGDYLQYDKPYYMLNLYDPNKYVDV
NNVGIRGYMYLKGPRGSVVTTNIYLNSSLYRGTKFIIKKYASGNKDNIVRNNDRVYINVVVKNKEYRLATNASQA
GVEKILSALEIPDVGNLSQVVVMKSKNDKGITNKCKMNLQDNNGNDIGFIGFHQFNNIAKLVASNWYNRQIERSS
RTLGCSWEFIPVDDGWGERPL
SEQ ID NO: 13
(Modified BoNT/A1 (N886K, N930K, S955K, Q991K, N1026K, N1052K,
Q1229K, M1144G) Polypeptide Sequence)
MPFVNKQFNYKDPVNGVDIAYIKIPNAGQMQPVKAFKIHNKIWVIPERDTFTNPEEGDLNPPPEAKQVPVSYYDS
TYLSTDNEKDNYLKGVTKLFERIYSTDLGRMLLTSIVRGIPFWGGSTIDTELKVIDTNCINVIQPDGSYRSEELN
LVIIGPSADIIQFECKSFGHEVLNLTRNGYGSTQYIRFSPDFTFGFEESLEVDTNPLLGAGKFATDPAVTLAHEL
IHAGHRLYGIAINPNRVFKVNTNAYYEMSGLEVSFEELRTFGGHDAKFIDSLQENEFRLYYYNKFKDIASTLNKA
KSIVGTTASLQYMKNVFKEKYLLSEDTSGKFSVDKLKFDKLYKMLTEIYTEDNFVKFFKVLNRKTYLNFDKAVFK
INIVPKVNYTIYDGFNLRNTNLAANFNGQNTEINNMNFTKLKNFTGLFEFYKLLCVRGIITSKTKSLDKGYNKAL
NDLCIKVNNWDLFFSPSEDNFTNDLNKGEEITSDTNIEAAEENISLDLIQQYYLTFNFDNEPENISIENLSSDII
GQLELMPNIERFPNGKKYELDKYTMFHYLRAQEFEHGKSRIALTNSVNEALLNPSRVYTFFSSDYVKKVNKATEA
AMFLGWVEQLVYDFTDETSEVSTTDKIADITIIIPYIGPALNIGNMLYKDDFVGALIFSGAVILLEFIPEIAIPV
LGTFALVSYIANKVLTVQTIDNALSKRNEKWDEVYKYIVTNWLAKVNTQIDLIRKKMKEALENQAEATKAIINYQ
YNQYTEEEKNNINFNIDDLSSKLNESINKAMININKFLNQCSVSYLMNSMIPYGVKRLEDFDASLKDALLKYIYD
NRGTLIGQVDRLKDKVNNTLSTDIPFQLSKYVDNQRLLSTFTEYIKNIINTSILNLRYESKHLIDLSRYASKINI
GSKVNFDPIDKNQIQLFNLESSKIEVILKKAIVYNSMYENFSTSFWIRIPKYFNKISLNNEYTIINCMENNSGWK
VSLNYGEIIWTLQDTKEIKQRVVFKYSQMINISDYINRWIFVTITNNRLNKSKIYINGRLIDQKPISNLGNIHAS
NKIMFKLDGCRDTHRYIWIKYFNLFDKELNEKEIKDLYDNQSNSGILKDFWGDYLQYDKPYYMLNLYDPNKYVDV
NNVGIRGYMYLKGPRGSVGTTNIYLNSSLYRGTKFIIKKYASGNKDNIVRNNDRVYINVVVKNKEYRLATNASQA
GVEKILSALEIPDVGNLSQVVVMKSKNDKGITNKCKMNLQDNNGNDIGFIGFHQFNNIAKLVASNWYNRQIERSS
RTLGCSWEFIPVDDGWGERPL
SEQ ID NO: 14
(Modified BoNT/A1 (N886K, N930K, S955K, Q991K, N1026K, N1052K,
Q1229K, M1144L) Polypeptide Sequence)
MPFVNKQFNYKDPVNGVDIAYIKIPNAGQMQPVKAFKIHNKIWVIPERDTFTNPEEGDLNPPPEAKQVPVSYYDS
TYLSTDNEKDNYLKGVTKLFERIYSTDLGRMLLTSIVRGIPFWGGSTIDTELKVIDTNCINVIQPDGSYRSEELN
LVIIGPSADIIQFECKSFGHEVLNLTRNGYGSTQYIRFSPDFTFGFEESLEVDTNPLLGAGKFATDPAVTLAHEL
IHAGHRLYGIAINPNRVFKVNTNAYYEMSGLEVSFEELRTFGGHDAKFIDSLQENEFRLYYYNKFKDIASTLNKA
KSIVGTTASLQYMKNVFKEKYLLSEDTSGKFSVDKLKFDKLYKMLTEIYTEDNFVKFFKVLNRKTYLNFDKAVFK
INIVPKVNYTIYDGFNLRNTNLAANFNGQNTEINNMNFTKLKNFTGLFEFYKLLCVRGIITSKTKSLDKGYNKAL
NDLCIKVNNWDLFFSPSEDNFTNDLNKGEEITSDTNIEAAEENISLDLIQQYYLTFNFDNEPENISIENLSSDII
GQLELMPNIERFPNGKKYELDKYTMFHYLRAQEFEHGKSRIALTNSVNEALLNPSRVYTFFSSDYVKKVNKATEA
AMFLGWVEQLVYDFTDETSEVSTTDKIADITIIIPYIGPALNIGNMLYKDDFVGALIFSGAVILLEFIPEIAIPV
LGTFALVSYIANKVLTVQTIDNALSKRNEKWDEVYKYIVTNWLAKVNTQIDLIRKKMKEALENQAEATKAIINYQ
YNQYTEEEKNNINFNIDDLSSKLNESINKAMININKFLNQCSVSYLMNSMIPYGVKRLEDFDASLKDALLKYIYD
NRGTLIGQVDRLKDKVNNTLSTDIPFQLSKYVDNQRLLSTFTEYIKNIINTSILNLRYESKHLIDLSRYASKINI
GSKVNFDPIDKNQIQLFNLESSKIEVILKKAIVYNSMYENFSTSFWIRIPKYFNKISLNNEYTIINCMENNSGWK
VSLNYGEIIWTLQDTKEIKQRVVFKYSQMINISDYINRWIFVTITNNRLNKSKIYINGRLIDQKPISNLGNIHAS
NKIMFKLDGCRDTHRYIWIKYFNLFDKELNEKEIKDLYDNQSNSGILKDFWGDYLQYDKPYYMLNLYDPNKYVDV
NNVGIRGYMYLKGPRGSVLTTNIYLNSSLYRGTKFIIKKYASGNKDNIVRNNDRVYINVVVKNKEYRLATNASQA
GVEKILSALEIPDVGNLSQVVVMKSKNDKGITNKCKMNLQDNNGNDIGFIGFHQFNNIAKLVASNWYNRQIERSS
RTLGCSWEFIPVDDGWGERPL
SEQ ID NO: 15
(Modified BoNT/A1 (N886K, N930K, S955K, Q991K, N1026K, N1052K,
Q1229K, M1144T) Polypeptide Sequence)
MPFVNKQFNYKDPVNGVDIAYIKIPNAGQMQPVKAFKIHNKIWVIPERDTFTNPEEGDLNPPPEAKQVPVSYYDS
TYLSTDNEKDNYLKGVTKLFERIYSTDLGRMLLTSIVRGIPFWGGSTIDTELKVIDTNCINVIQPDGSYRSEELN
LVIIGPSADIIQFECKSFGHEVLNLTRNGYGSTQYIRFSPDFTFGFEESLEVDTNPLLGAGKFATDPAVTLAHEL
IHAGHRLYGIAINPNRVFKVNTNAYYEMSGLEVSFEELRTFGGHDAKFIDSLQENEFRLYYYNKFKDIASTLNKA
KSIVGTTASLQYMKNVFKEKYLLSEDTSGKFSVDKLKFDKLYKMLTEIYTEDNFVKFFKVLNRKTYLNFDKAVFK
INIVPKVNYTIYDGFNLRNTNLAANFNGQNTEINNMNFTKLKNFTGLFEFYKLLCVRGIITSKTKSLDKGYNKAL
NDLCIKVNNWDLFFSPSEDNFTNDLNKGEEITSDTNIEAAEENISLDLIQQYYLTFNFDNEPENISIENLSSDII
GQLELMPNIERFPNGKKYELDKYTMFHYLRAQEFEHGKSRIALTNSVNEALLNPSRVYTFFSSDYVKKVNKATEA
AMFLGWVEQLVYDFTDETSEVSTTDKIADITIIIPYIGPALNIGNMLYKDDFVGALIFSGAVILLEFIPEIAIPV
LGTFALVSYIANKVLTVQTIDNALSKRNEKWDEVYKYIVTNWLAKVNTQIDLIRKKMKEALENQAEATKAIINYQ
YNQYTEEEKNNINFNIDDLSSKLNESINKAMININKFLNQCSVSYLMNSMIPYGVKRLEDFDASLKDALLKYIYD
NRGTLIGQVDRLKDKVNNTLSTDIPFQLSKYVDNQRLLSTFTEYIKNIINTSILNLRYESKHLIDLSRYASKINI
GSKVNFDPIDKNQIQLFNLESSKIEVILKKAIVYNSMYENFSTSFWIRIPKYFNKISLNNEYTIINCMENNSGWK
VSLNYGEIIWTLQDTKEIKQRVVFKYSQMINISDYINRWIFVTITNNRLNKSKIYINGRLIDQKPISNLGNIHAS
NKIMFKLDGCRDTHRYIWIKYFNLFDKELNEKEIKDLYDNQSNSGILKDFWGDYLQYDKPYYMLNLYDPNKYVDV
NNVGIRGYMYLKGPRGSVTTTNIYLNSSLYRGTKFIIKKYASGNKDNIVRNNDRVYINVVVKNKEYRLATNASQA
GVEKILSALEIPDVGNLSQVVVMKSKNDKGITNKCKMNLQDNNGNDIGFIGFHQFNNIAKLVASNWYNRQIERSS
RTLGCSWEFIPVDDGWGERPL
SEQ ID NO: 16
(Modified BoNT/A1 (N886K, N930K, S955K, Q991K, N1026K, N1052K,
Q1229K, M1144A) Polypeptide Sequence)
MPFVNKQFNYKDPVNGVDIAYIKIPNAGQMQPVKAFKIHNKIWVIPERDTFTNPEEGDLNPPPEAKQVPVSYYDS
TYLSTDNEKDNYLKGVTKLFERIYSTDLGRMLLTSIVRGIPFWGGSTIDTELKVIDTNCINVIQPDGSYRSEELN
LVIIGPSADIIQFECKSFGHEVLNLTRNGYGSTQYIRFSPDFTFGFEESLEVDTNPLLGAGKFATDPAVTLAHEL
IHAGHRLYGIAINPNRVFKVNTNAYYEMSGLEVSFEELRTFGGHDAKFIDSLQENEFRLYYYNKFKDIASTLNKA
KSIVGTTASLQYMKNVFKEKYLLSEDTSGKFSVDKLKFDKLYKMLTEIYTEDNFVKFFKVLNRKTYLNFDKAVFK
INIVPKVNYTIYDGFNLRNTNLAANFNGQNTEINNMNFTKLKNFTGLFEFYKLLCVRGIITSKTKSLDKGYNKAL
NDLCIKVNNWDLFFSPSEDNFTNDLNKGEEITSDTNIEAAEENISLDLIQQYYLTFNFDNEPENISIENLSSDII
GQLELMPNIERFPNGKKYELDKYTMFHYLRAQEFEHGKSRIALTNSVNEALLNPSRVYTFFSSDYVKKVNKATEA
AMFLGWVEQLVYDFTDETSEVSTTDKIADITIIIPYIGPALNIGNMLYKDDFVGALIFSGAVILLEFIPEIAIPV
LGTFALVSYIANKVLTVQTIDNALSKRNEKWDEVYKYIVTNWLAKVNTQIDLIRKKMKEALENQAEATKAIINYQ
YNQYTEEEKNNINFNIDDLSSKLNESINKAMININKFLNQCSVSYLMNSMIPYGVKRLEDFDASLKDALLKYIYD
NRGTLIGQVDRLKDKVNNTLSTDIPFQLSKYVDNQRLLSTFTEYIKNIINTSILNLRYESKHLIDLSRYASKINI
GSKVNFDPIDKNQIQLFNLESSKIEVILKKAIVYNSMYENFSTSFWIRIPKYFNKISLNNEYTIINCMENNSGWK
VSLNYGEIIWTLQDTKEIKQRVVFKYSQMINISDYINRWIFVTITNNRLNKSKIYINGRLIDQKPISNLGNIHAS
NKIMFKLDGCRDTHRYIWIKYFNLFDKELNEKEIKDLYDNQSNSGILKDFWGDYLQYDKPYYMLNLYDPNKYVDV
NNVGIRGYMYLKGPRGSVATTNIYLNSSLYRGTKFIIKKYASGNKDNIVRNNDRVYINVVVKNKEYRLATNASQA
GVEKILSALEIPDVGNLSQVVVMKSKNDKGITNKCKMNLQDNNGNDIGFIGFHQENNIAKLVASNWYNRQIERSS
RTLGCSWEFIPVDDGWGERPL
SEQ ID NO: 17
(Modified BoNT/A1 (N886K, N930K, S955K, Q991K, N1026K, N1052K,
Q1229K, M11441) Polypeptide Sequence)
MPFVNKQFNYKDPVNGVDIAYIKIPNAGQMQPVKAFKIHNKIWVIPERDTFTNPEEGDLNPPPEAKQVPVSYYDS
TYLSTDNEKDNYLKGVTKLFERIYSTDLGRMLLTSIVRGIPFWGGSTIDTELKVIDTNCINVIQPDGSYRSEELN
LVIIGPSADIIQFECKSFGHEVLNLTRNGYGSTQYIRFSPDFTFGFEESLEVDTNPLLGAGKFATDPAVTLAHEL
IHAGHRLYGIAINPNRVFKVNTNAYYEMSGLEVSFEELRTFGGHDAKFIDSLQENEFRLYYYNKFKDIASTLNKA
KSIVGTTASLQYMKNVFKEKYLLSEDTSGKFSVDKLKFDKLYKMLTEIYTEDNFVKFFKVLNRKTYLNFDKAVFK
INIVPKVNYTIYDGFNLRNTNLAANFNGQNTEINNMNFTKLKNFTGLFEFYKLLCVRGIITSKTKSLDKGYNKAL
NDLCIKVNNWDLFFSPSEDNFTNDLNKGEEITSDTNIEAAEENISLDLIQQYYLTFNFDNEPENISIENLSSDII
GQLELMPNIERFPNGKKYELDKYTMFHYLRAQEFEHGKSRIALTNSVNEALLNPSRVYTFFSSDYVKKVNKATEA
AMFLGWVEQLVYDFTDETSEVSTTDKIADITIIIPYIGPALNIGNMLYKDDFVGALIFSGAVILLEFIPEIAIPV
LGTFALVSYIANKVLTVQTIDNALSKRNEKWDEVYKYIVTNWLAKVNTQIDLIRKKMKEALENQAEATKAIINYQ
YNQYTEEEKNNINFNIDDLSSKLNESINKAMININKFLNQCSVSYLMNSMIPYGVKRLEDFDASLKDALLKYIYD
NRGTLIGQVDRLKDKVNNTLSTDIPFQLSKYVDNQRLLSTFTEYIKNIINTSILNLRYESKHLIDLSRYASKINI
GSKVNFDPIDKNQIQLFNLESSKIEVILKKAIVYNSMYENFSTSFWIRIPKYFNKISLNNEYTIINCMENNSGWK
VSLNYGEIIWTLQDTKEIKQRVVFKYSQMINISDYINRWIFVTITNNRLNKSKIYINGRLIDQKPISNLGNIHAS
NKIMFKLDGCRDTHRYIWIKYFNLFDKELNEKEIKDLYDNQSNSGILKDFWGDYLQYDKPYYMLNLYDPNKYVDV
NNVGIRGYMYLKGPRGSVITTNIYLNSSLYRGTKFIIKKYASGNKDNIVRNNDRVYINVVVKNKEYRLATNASQA
GVEKILSALEIPDVGNLSQVVVMKSKNDKGITNKCKMNLQDNNGNDIGFIGFHQFNNIAKLVASNWYNRQIERSS
RTLGCSWEFIPVDDGWGERPL
SEQ ID NO: 18
(Modified BoNT/A1 (N886K, N930K, S955K, Q991K, N1026K, N1052K,
Q1229K, M1144 Deletion) Polypeptide Sequence)
MPFVNKQFNYKDPVNGVDIAYIKIPNAGQMQPVKAFKIHNKIWVIPERDTFTNPEEGDLNPPPEAKQVPVSYYDS
TYLSTDNEKDNYLKGVTKLFERIYSTDLGRMLLTSIVRGIPFWGGSTIDTELKVIDTNCINVIQPDGSYRSEELN
LVIIGPSADIIQFECKSFGHEVLNLTRNGYGSTQYIRFSPDFTFGFEESLEVDTNPLLGAGKFATDPAVTLAHEL
IHAGHRLYGIAINPNRVFKVNTNAYYEMSGLEVSFEELRTFGGHDAKFIDSLQENEFRLYYYNKFKDIASTLNKA
KSIVGTTASLQYMKNVFKEKYLLSEDTSGKFSVDKLKFDKLYKMLTEIYTEDNFVKFFKVLNRKTYLNFDKAVFK
INIVPKVNYTIYDGFNLRNTNLAANFNGQNTEINNMNFTKLKNFTGLFEFYKLLCVRGIITSKTKSLDKGYNKAL
NDLCIKVNNWDLFFSPSEDNFTNDLNKGEEITSDTNIEAAEENISLDLIQQYYLTFNFDNEPENISIENLSSDII
GQLELMPNIERFPNGKKYELDKYTMFHYLRAQEFEHGKSRIALTNSVNEALLNPSRVYTFFSSDYVKKVNKATEA
AMFLGWVEQLVYDFTDETSEVSTTDKIADITIIIPYIGPALNIGNMLYKDDFVGALIFSGAVILLEFIPEIAIPV
LGTFALVSYIANKVLTVQTIDNALSKRNEKWDEVYKYIVTNWLAKVNTQIDLIRKKMKEALENQAEATKAIINYQ
YNQYTEEEKNNINFNIDDLSSKLNESINKAMININKFLNQCSVSYLMNSMIPYGVKRLEDFDASLKDALLKYIYD
NRGTLIGQVDRLKDKVNNTLSTDIPFQLSKYVDNQRLLSTFTEYIKNIINTSILNLRYESKHLIDLSRYASKINI
GSKVNFDPIDKNQIQLFNLESSKIEVILKKAIVYNSMYENFSTSFWIRIPKYFNKISLNNEYTIINCMENNSGWK
VSLNYGEIIWTLQDTKEIKQRVVFKYSQMINISDYINRWIFVTITNNRLNKSKIYINGRLIDQKPISNLGNIHAS
NKIMFKLDGCRDTHRYIWIKYFNLFDKELNEKEIKDLYDNQSNSGILKDFWGDYLQYDKPYYMLNLYDPNKYVDV
NNVGIRGYMYLKGPRGSVTTNIYLNSSLYRGTKFIIKKYASGNKDNIVRNNDRVYINVVVKNKEYRLATNASQAG
VEKILSALEIPDVGNLSQVVVMKSKNDKGITNKCKMNLQDNNGNDIGFIGFHQFNNIAKLVASNWYNRQIERSSR
TLGCSWEFIPVDDGWGERPL
SEQ ID NO: 19
(BoNT/A1 (N954K, N930K, S955K, Q991K, N1026K, N1052K, Q1229K)
Nucleic Acid Sequence)
ATGCCATTCGTCAACAAGCAATTCAACTACAAAGACCCAGTCAACGGCGTCGACATCGCATACATCAAGATTCCG
AACGCCGGTCAAATGCAGCCGGTTAAGGCTTTTAAGATCCACAACAAGATTTGGGTTATCCCGGAGCGTGACACC
TTCACGAACCCGGAAGAAGGCGATCTGAACCCGCCACCGGAAGCGAAGCAAGTCCCTGTCAGCTACTACGATTCG
ACGTACCTGAGCACGGATAACGAAAAAGATAACTACCTGAAAGGTGTGACCAAGCTGTTCGAACGTATCTACAGC
ACGGATCTGGGTCGCATGCTGCTGACTAGCATTGTTCGCGGTATCCCGTTCTGGGGTGGTAGCACGATTGACACC
GAACTGAAGGTTATCGACACTAACTGCATTAACGTTATTCAACCGGATGGTAGCTATCGTAGCGAAGAGCTGAAT
CTGGTCATCATTGGCCCGAGCGCAGACATTATCCAATTCGAGTGCAAGAGCTTTGGTCACGAGGTTCTGAATCTG
ACCCGCAATGGCTATGGTAGCACCCAGTACATTCGTTTTTCGCCGGATTTTACCTTCGGCTTTGAAGAGAGCCTG
GAGGTTGATACCAATCCGTTGCTGGGTGCGGGCAAATTCGCTACCGATCCGGCTGTCACGCTGGCCCATGAACTG
ATCCACGCAGGCCACCGCCTGTACGGCATTGCCATCAACCCAAACCGTGTGTTCAAGGTTAATACGAATGCATAC
TACGAGATGAGCGGCCTGGAAGTCAGCTTCGAAGAACTGCGCACCTTCGGTGGCCATGACGCTAAATTCATTGAC
AGCTTGCAAGAGAATGAGTTCCGTCTGTACTACTATAACAAATTCAAAGACATTGCAAGCACGTTGAACAAGGCC
AAAAGCATCGTTGGTACTACCGCGTCGTTGCAGTATATGAAGAATGTGTTTAAAGAGAAGTACCTGCTGTCCGAG
GATACCTCCGGCAAGTTTAGCGTTGATAAGCTGAAGTTTGACAAACTGTACaAGATGCTGACCGAGATTTACACC
GAGGACAACTTTGTGAAATTCTTCAAAGTGTTGAATCGTAAAACCTATCTGAATTTTGACAAAGCGGTTTTCAAG
ATTAACATCGTGCCGAAGGTGAACTACACCATCTATGACGGTTTTAACCTGCGTAACACCAACCTGGCGGCGAAC
TTTAACGGTCAGAATACGGAAATCAACAACATGAATTTCACGAAGTTGAAGAACTTCACGGGTCTGTTCGAGTTC
TATAAGCTGCTGTGCGTGCGCGGTATCATCACCAGCAAAACCAAAAGCCTGGACAAAGGCTACAACAAGGCGCTG
AATGACCTGTGCATTAAGGTAAACAATTGGGATCTGTTCTTTTCGCCATCCGAAGATAATTTTACCAACGACCTG
AACAAGGGTGAAGAAATCACCAGCGATACGAATATTGAAGCAGCGGAAGAGAATATCAGCCTGGATCTGATCCAG
CAGTACTATCTGACCTTTAACTTCGACAATGAACCGGAGAACATTAGCATTGAGAATCTGAGCAGCGACATTATC
GGTCAGCTGGAACTGATGCCGAATATCGAACGTTTCCCGAACGGCAAAAAGTACGAGCTGGACAAGTACACTATG
TTCCATTACCTGCGTGCACAGGAGTTTGAACACGGTAAAAGCCGTATCGCGCTGACCAACAGCGTTAACGAGGCC
CTGCTGAACCCGAGCCGTGTCTATACCTTCTTCAGCAGCGACTATGTTAAGAAAGTGAACAAAGCCACTGAGGCC
GCGATGTTCCTGGGCTGGGTGGAACAGCTGGTATATGACTTCACGGACGAGACGAGCGAAGTGAGCACTACCGAC
AAAATTGCTGATATTACCATCATTATCCCGTATATTGGTCCGGCACTGAACATTGGCAACATGCTGTACAAAGAC
GATTTTGTGGGTGCCCTGATCTTCTCCGGTGCCGTGATTCTGCTGGAGTTCATTCCGGAGATTGCGATCCCGGTG
TTGGGTACCTTCGCGCTGGTGTCCTACATCGCGAATAAGGTTCTGACGGTTCAGACCATCGATAACGCGCTGTCG
AAACGTAATGAAAAATGGGACGAGGTTTACAAATACATTGTTACGAATTGGCTGGCGAAAGTCAATACCCAGATC
GACCTGATCCGTAAGAAAATGAAAGAGGCGCTGGAGAATCAGGCGGAGGCCACCAAAGCAATTATCAACTACCAA
TACAACCAGTACACGGAAGAAGAGAAGAATAACATTAACTTCAATATCGATGATTTGAGCAGCAAGCTGAATGAA
TCTATCAACAAAGCGATGATCAATATCAACAAGTTTTTGAATCAGTGTAGCGTTTCGTACCTGATGAATAGCATG
ATTCCGTATGGCGTCAAACGTCTGGAGGACTTCGACGCCAGCCTGAAAGATGCGTTGCTGAAATACATTTACGAC
AaTCGTGGTACGCTGATTGGCCAAGTTGACCGCTTGAAAGACAAAGTTAACAATACCCTGAGCACCGACATCCCA
TTTCAACTGAGCAAGTATGTTGATAATCAACGTCTGTTGAGCACTTTCACCGAGTATATCAAAAACATCATCAAT
ACTAGCATTCTGAACCTGCGTTACGAGAGCAATCATCTGATTGATCTGAGCCGTTATGCTAGCAAGATCAACATC
GGTAGCAAGGTCAATTTTGACCCGATCGATAAGAACCAGATCCAGCTGTTTAATCTGGAATCGAGCAAAATTGAG
GTTATCCTGAAAAAGGCCATTGTCTACAACTCCATGTACGAGAATTTCTCCACCAGCTTCTGGATTCGCATCCCG
AAATACTTCAAGAAGATTAGCCTGAACAACGAGTATACTATCATCAACTGTATGGAGAACAACAGCGGTTGGAAG
GTGTCTCTGAACTATGGTGAGATCATTTGGACCTTGCAGGACACCAAAGAGATCAAGCAGCGCGTCGTGTTCAAG
TACTCTCAAATGATCAACATTTCCGATTACATTAATCGTTGGATCTTCGTGACCATTACGAATAACCGTCTGAAT
AAGAGCAAGATTTACATCAATGGTCGCTTGATCGATCAGAAACCGATTAGCAACCTGGGTAATATCCACGCAAGC
AACAAGATTATGTTCAAATTGGACGGTTGCCGCGATACCCATCGTTATATCTGGATCAAGTATTTCAACCTGTTT
GATAAAGAACTGAATGAGAAGGAGATCAAAGATTTGTATGACAACCAATCTAACAGCGGCATTTTGAAGGACTTC
TGGGGCGATTATCTGCAATACGATAAGCCGTACTATATGCTGAACCTGTATGATCCGAACAAATATGTGGATGTC
AATAATGTGGGTATTCGTGGTTACATGTATTTGAAGGGTCCGCGTGGCAGCGTTATGACGACCAACATTTACCTG
AACTCTAGCCTGTACCGTGGTACGAAATTCATCATTAAGAAATATGCCAGCGGCAACAAAGATAACATTGTGCGT
AATAACGATCGTGTCTACATCAACGTGGTCGTGAAGAATAAAGAGTACCGTCTGGCGACCAACGCTTCGCAGGCG
GGTGTTGAGAAAATTCTGAGCGCGTTGGAGATCCCTGATGTCGGTAATCTGAGCCAAGTCGTGGTTATGAAGAGC
AAGAACGACAAGGGTATCACTAACAAGTGCAAGATGAACCTGCAAGACAACAATGGTAACGACATCGGCTTTATT
GGTTTCCACCAGTTCAACAATATTGCTAAACTGGTAGCGAGCAATTGGTACAATCGTCAGATTGAGCGCAGCAGC
CGTACTTTGGGCTGTAGCTGGGAGTTTATCCCGGTCGATGATGGTTGGGGCGAACGTCCGCTG
SEQ ID NO: 20
(BoNT/A1 (N954K, N930K, S955K, Q991K, N1026K, N1052K, Q1229K)
Polypeptide Sequence)
MPFVNKQFNYKDPVNGVDIAYIKIPNAGQMQPVKAFKIHNKIWVIPERDTFTNPEEGDLNPPPEAKQVPVSYYDS
TYLSTDNEKDNYLKGVTKLFERIYSTDLGRMLLTSIVRGIPFWGGSTIDTELKVIDTNCINVIQPDGSYRSEELN
LVIIGPSADIIQFECKSFGHEVLNLTRNGYGSTQYIRFSPDFTFGFEESLEVDTNPLLGAGKFATDPAVTLAHEL
IHAGHRLYGIAINPNRVFKVNTNAYYEMSGLEVSFEELRTFGGHDAKFIDSLQENEFRLYYYNKFKDIASTLNKA
KSIVGTTASLQYMKNVFKEKYLLSEDTSGKFSVDKLKFDKLYKMLTEIYTEDNFVKFFKVLNRKTYLNFDKAVFK
INIVPKVNYTIYDGFNLRNTNLAANFNGQNTEINNMNFTKLKNFTGLFEFYKLLCVRGIITSKTKSLDKGYNKAL
NDLCIKVNNWDLFFSPSEDNFTNDLNKGEEITSDTNIEAAEENISLDLIQQYYLTFNFDNEPENISIENLSSDII
GQLELMPNIERFPNGKKYELDKYTMFHYLRAQEFEHGKSRIALTNSVNEALLNPSRVYTFFSSDYVKKVNKATEA
AMFLGWVEQLVYDFTDETSEVSTTDKIADITIIIPYIGPALNIGNMLYKDDFVGALIFSGAVILLEFIPEIAIPV
LGTFALVSYIANKVLTVQTIDNALSKRNEKWDEVYKYIVTNWLAKVNTQIDLIRKKMKEALENQAEATKAIINYQ
YNQYTEEEKNNINFNIDDLSSKLNESINKAMININKFLNQCSVSYLMNSMIPYGVKRLEDFDASLKDALLKYIYD
NRGTLIGQVDRLKDKVNNTLSTDIPFQLSKYVDNQRLLSTFTEYIKNIINTSILNLRYESNHLIDLSRYASKINI
GSKVNFDPIDKNQIQLFNLESSKIEVILKKAIVYNSMYENFSTSFWIRIPKYFKKISLNNEYTIINCMENNSGWK
VSLNYGEIIWTLQDTKEIKQRVVFKYSQMINISDYINRWIFVTITNNRLNKSKIYINGRLIDQKPISNLGNIHAS
NKIMFKLDGCRDTHRYIWIKYFNLFDKELNEKEIKDLYDNQSNSGILKDFWGDYLQYDKPYYMLNLYDPNKYVDV
NNVGIRGYMYLKGPRGSVMTTNIYLNSSLYRGTKFIIKKYASGNKDNIVRNNDRVYINVVVKNKEYRLATNASQA
GVEKILSALEIPDVGNLSQVVVMKSKNDKGITNKCKMNLQDNNGNDIGFIGFHQFNNIAKLVASNWYNRQIERSS
RTLGCSWEFIPVDDGWGERPL
SEQ ID NO: 21
(Modified BoNT/A1 (N954K, N930K, S955K, Q991K, N1026K, N1052K,
Q1229K, M1144V) Polypeptide Sequence)
MPFVNKQFNYKDPVNGVDIAYIKIPNAGQMQPVKAFKIHNKIWVIPERDTFTNPEEGDLNPPPEAKQVPVSYYDS
TYLSTDNEKDNYLKGVTKLFERIYSTDLGRMLLTSIVRGIPFWGGSTIDTELKVIDTNCINVIQPDGSYRSEELN
LVIIGPSADIIQFECKSFGHEVLNLTRNGYGSTQYIRFSPDFTFGFEESLEVDTNPLLGAGKFATDPAVTLAHEL
IHAGHRLYGIAINPNRVFKVNTNAYYEMSGLEVSFEELRTFGGHDAKFIDSLQENEFRLYYYNKFKDIASTLNKA
KSIVGTTASLQYMKNVFKEKYLLSEDTSGKFSVDKLKFDKLYKMLTEIYTEDNFVKFFKVLNRKTYLNFDKAVFK
INIVPKVNYTIYDGFNLRNTNLAANFNGQNTEINNMNFTKLKNFTGLFEFYKLLCVRGIITSKTKSLDKGYNKAL
NDLCIKVNNWDLFFSPSEDNFTNDLNKGEEITSDTNIEAAEENISLDLIQQYYLTFNFDNEPENISIENLSSDII
GQLELMPNIERFPNGKKYELDKYTMFHYLRAQEFEHGKSRIALTNSVNEALLNPSRVYTFFSSDYVKKVNKATEA
AMFLGWVEQLVYDFTDETSEVSTTDKIADITIIIPYIGPALNIGNMLYKDDFVGALIFSGAVILLEFIPEIAIPV
LGTFALVSYIANKVLTVQTIDNALSKRNEKWDEVYKYIVTNWLAKVNTQIDLIRKKMKEALENQAEATKAIINYQ
YNQYTEEEKNNINFNIDDLSSKLNESINKAMININKFLNQCSVSYLMNSMIPYGVKRLEDFDASLKDALLKYIYD
NRGTLIGQVDRLKDKVNNTLSTDIPFQLSKYVDNQRLLSTFTEYIKNIINTSILNLRYESNHLIDLSRYASKINI
GSKVNFDPIDKNQIQLFNLESSKIEVILKKAIVYNSMYENFSTSFWIRIPKYFKKISLNNEYTIINCMENNSGWK
VSLNYGEIIWTLQDTKEIKQRVVFKYSQMINISDYINRWIFVTITNNRLNKSKIYINGRLIDQKPISNLGNIHAS
NKIMFKLDGCRDTHRYIWIKYFNLFDKELNEKEIKDLYDNQSNSGILKDFWGDYLQYDKPYYMLNLYDPNKYVDV
NNVGIRGYMYLKGPRGSVVTTNIYLNSSLYRGTKFIIKKYASGNKDNIVRNNDRVYINVVVKNKEYRLATNASQA
GVEKILSALEIPDVGNLSQVVVMKSKNDKGITNKCKMNLQDNNGNDIGFIGFHQFNNIAKLVASNWYNRQIERSS
RTLGCSWEFIPVDDGWGERPL
SEQ ID NO: 22
(Modified BoNT/A1 (N954K, N930K, S955K, Q991K, N1026K, N1052K,
Q1229K, M1144G) Polypeptide Sequence)
MPFVNKQFNYKDPVNGVDIAYIKIPNAGQMQPVKAFKIHNKIWVIPERDTFTNPEEGDLNPPPEAKQVPVSYYDS
TYLSTDNEKDNYLKGVTKLFERIYSTDLGRMLLTSIVRGIPFWGGSTIDTELKVIDTNCINVIQPDGSYRSEELN
LVIIGPSADIIQFECKSFGHEVLNLTRNGYGSTQYIRFSPDFTFGFEESLEVDTNPLLGAGKFATDPAVTLAHEL
IHAGHRLYGIAINPNRVFKVNTNAYYEMSGLEVSFEELRTFGGHDAKFIDSLQENEFRLYYYNKFKDIASTLNKA
KSIVGTTASLQYMKNVFKEKYLLSEDTSGKFSVDKLKFDKLYKMLTEIYTEDNFVKFFKVLNRKTYLNFDKAVFK
INIVPKVNYTIYDGFNLRNTNLAANFNGQNTEINNMNFTKLKNFTGLFEFYKLLCVRGIITSKTKSLDKGYNKAL
NDLCIKVNNWDLFFSPSEDNFTNDLNKGEEITSDTNIEAAEENISLDLIQQYYLTFNFDNEPENISIENLSSDII
GQLELMPNIERFPNGKKYELDKYTMFHYLRAQEFEHGKSRIALTNSVNEALLNPSRVYTFFSSDYVKKVNKATEA
AMFLGWVEQLVYDFTDETSEVSTTDKIADITIIIPYIGPALNIGNMLYKDDFVGALIFSGAVILLEFIPEIAIPV
LGTFALVSYIANKVLTVQTIDNALSKRNEKWDEVYKYIVTNWLAKVNTQIDLIRKKMKEALENQAEATKAIINYQ
YNQYTEEEKNNINFNIDDLSSKLNESINKAMININKFLNQCSVSYLMNSMIPYGVKRLEDFDASLKDALLKYIYD
NRGTLIGQVDRLKDKVNNTLSTDIPFQLSKYVDNQRLLSTFTEYIKNIINTSILNLRYESNHLIDLSRYASKINI
GSKVNFDPIDKNQIQLFNLESSKIEVILKKAIVYNSMYENFSTSFWIRIPKYFKKISLNNEYTIINCMENNSGWK
VSLNYGEIIWTLQDTKEIKQRVVFKYSQMINISDYINRWIFVTITNNRLNKSKIYINGRLIDQKPISNLGNIHAS
NKIMFKLDGCRDTHRYIWIKYFNLFDKELNEKEIKDLYDNQSNSGILKDFWGDYLQYDKPYYMLNLYDPNKYVDV
NNVGIRGYMYLKGPRGSVGTTNIYLNSSLYRGTKFIIKKYASGNKDNIVRNNDRVYINVVVKNKEYRLATNASQA
GVEKILSALEIPDVGNLSQVVVMKSKNDKGITNKCKMNLQDNNGNDIGFIGFHQFNNIAKLVASNWYNRQIERSS
RTLGCSWEFIPVDDGWGERPL
SEQ ID NO: 23
(Modified BoNT/A1 (N954K, N930K, S955K, Q991K, N1026K, N1052K,
Q1229K, M1144L) Polypeptide Sequence)
MPFVNKQFNYKDPVNGVDIAYIKIPNAGQMQPVKAFKIHNKIWVIPERDTFTNPEEGDLNPPPEAKQVPVSYYDS
TYLSTDNEKDNYLKGVTKLFERIYSTDLGRMLLTSIVRGIPFWGGSTIDTELKVIDTNCINVIQPDGSYRSEELN
LVIIGPSADIIQFECKSFGHEVLNLTRNGYGSTQYIRFSPDFTFGFEESLEVDTNPLLGAGKFATDPAVTLAHEL
IHAGHRLYGIAINPNRVFKVNTNAYYEMSGLEVSFEELRTFGGHDAKFIDSLQENEFRLYYYNKFKDIASTLNKA
KSIVGTTASLQYMKNVFKEKYLLSEDTSGKFSVDKLKFDKLYKMLTEIYTEDNFVKFFKVLNRKTYLNFDKAVFK
INIVPKVNYTIYDGFNLRNTNLAANFNGQNTEINNMNFTKLKNFTGLFEFYKLLCVRGIITSKTKSLDKGYNKAL
NDLCIKVNNWDLFFSPSEDNFTNDLNKGEEITSDTNIEAAEENISLDLIQQYYLTFNFDNEPENISIENLSSDII
GQLELMPNIERFPNGKKYELDKYTMFHYLRAQEFEHGKSRIALTNSVNEALLNPSRVYTFFSSDYVKKVNKATEA
AMFLGWVEQLVYDFTDETSEVSTTDKIADITIIIPYIGPALNIGNMLYKDDFVGALIFSGAVILLEFIPEIAIPV
LGTFALVSYIANKVLTVQTIDNALSKRNEKWDEVYKYIVTNWLAKVNTQIDLIRKKMKEALENQAEATKAIINYQ
YNQYTEEEKNNINFNIDDLSSKLNESINKAMININKFLNQCSVSYLMNSMIPYGVKRLEDFDASLKDALLKYIYD
NRGTLIGQVDRLKDKVNNTLSTDIPFQLSKYVDNQRLLSTFTEYIKNIINTSILNLRYESNHLIDLSRYASKINI
GSKVNFDPIDKNQIQLFNLESSKIEVILKKAIVYNSMYENFSTSFWIRIPKYFKKISLNNEYTIINCMENNSGWK
VSLNYGEIIWTLQDTKEIKQRVVFKYSQMINISDYINRWIFVTITNNRLNKSKIYINGRLIDQKPISNLGNIHAS
NKIMFKLDGCRDTHRYIWIKYFNLFDKELNEKEIKDLYDNQSNSGILKDFWGDYLQYDKPYYMLNLYDPNKYVDV
NNVGIRGYMYLKGPRGSVLTTNIYLNSSLYRGTKFIIKKYASGNKDNIVRNNDRVYINVVVKNKEYRLATNASQA
GVEKILSALEIPDVGNLSQVVVMKSKNDKGITNKCKMNLQDNNGNDIGFIGFHQFNNIAKLVASNWYNRQIERSS
RTLGCSWEFIPVDDGWGERPL
SEQ ID NO: 24
(Modified BoNT/A1 (N954K, N930K, S955K, Q991K, N1026K, N1052K,
Q1229K, M1144T) Polypeptide Sequence)
MPFVNKQFNYKDPVNGVDIAYIKIPNAGQMQPVKAFKIHNKIWVIPERDTFTNPEEGDLNPPPEAKQVPVSYYDS
TYLSTDNEKDNYLKGVTKLFERIYSTDLGRMLLTSIVRGIPFWGGSTIDTELKVIDTNCINVIQPDGSYRSEELN
LVIIGPSADIIQFECKSFGHEVLNLTRNGYGSTQYIRFSPDFTFGFEESLEVDTNPLLGAGKFATDPAVTLAHEL
IHAGHRLYGIAINPNRVFKVNTNAYYEMSGLEVSFEELRTFGGHDAKFIDSLQENEFRLYYYNKFKDIASTLNKA
KSIVGTTASLQYMKNVFKEKYLLSEDTSGKFSVDKLKFDKLYKMLTEIYTEDNFVKFFKVLNRKTYLNFDKAVFK
INIVPKVNYTIYDGFNLRNTNLAANFNGQNTEINNMNFTKLKNFTGLFEFYKLLCVRGIITSKTKSLDKGYNKAL
NDLCIKVNNWDLFFSPSEDNFTNDLNKGEEITSDTNIEAAEENISLDLIQQYYLTFNFDNEPENISIENLSSDII
GQLELMPNIERFPNGKKYELDKYTMFHYLRAQEFEHGKSRIALTNSVNEALLNPSRVYTFFSSDYVKKVNKATEA
AMFLGWVEQLVYDFTDETSEVSTTDKIADITIIIPYIGPALNIGNMLYKDDFVGALIFSGAVILLEFIPEIAIPV
LGTFALVSYIANKVLTVQTIDNALSKRNEKWDEVYKYIVTNWLAKVNTQIDLIRKKMKEALENQAEATKAIINYQ
YNQYTEEEKNNINFNIDDLSSKLNESINKAMININKFLNQCSVSYLMNSMIPYGVKRLEDFDASLKDALLKYIYD
NRGTLIGQVDRLKDKVNNTLSTDIPFQLSKYVDNQRLLSTFTEYIKNIINTSILNLRYESNHLIDLSRYASKINI
GSKVNFDPIDKNQIQLFNLESSKIEVILKKAIVYNSMYENFSTSFWIRIPKYFKKISLNNEYTIINCMENNSGWK
VSLNYGEIIWTLQDTKEIKQRVVFKYSQMINISDYINRWIFVTITNNRLNKSKIYINGRLIDQKPISNLGNIHAS
NKIMFKLDGCRDTHRYIWIKYFNLFDKELNEKEIKDLYDNQSNSGILKDFWGDYLQYDKPYYMLNLYDPNKYVDV
NNVGIRGYMYLKGPRGSVTTTNIYLNSSLYRGTKFIIKKYASGNKDNIVRNNDRVYINVVVKNKEYRLATNASQA
GVEKILSALEIPDVGNLSQVVVMKSKNDKGITNKCKMNLQDNNGNDIGFIGFHQFNNIAKLVASNWYNRQIERSS
RTLGCSWEFIPVDDGWGERPL
SEQ ID NO: 25
(Modified BoNT/A1 (N954K, N930K, S955K, Q991K, N1026K, N1052K,
Q1229K, M1144A) Polypeptide Sequence)
MPFVNKQFNYKDPVNGVDIAYIKIPNAGQMQPVKAFKIHNKIWVIPERDTFTNPEEGDLNPPPEAKQVPVSYYDS
TYLSTDNEKDNYLKGVTKLFERIYSTDLGRMLLTSIVRGIPFWGGSTIDTELKVIDTNCINVIQPDGSYRSEELN
LVIIGPSADIIQFECKSFGHEVLNLTRNGYGSTQYIRFSPDFTFGFEESLEVDTNPLLGAGKFATDPAVTLAHEL
IHAGHRLYGIAINPNRVFKVNTNAYYEMSGLEVSFEELRTFGGHDAKFIDSLQENEFRLYYYNKFKDIASTLNKA
KSIVGTTASLQYMKNVFKEKYLLSEDTSGKFSVDKLKFDKLYKMLTEIYTEDNFVKFFKVLNRKTYLNFDKAVFK
INIVPKVNYTIYDGFNLRNTNLAANFNGQNTEINNMNFTKLKNFTGLFEFYKLLCVRGIITSKTKSLDKGYNKAL
NDLCIKVNNWDLFFSPSEDNFTNDLNKGEEITSDTNIEAAEENISLDLIQQYYLTFNFDNEPENISIENLSSDII
GQLELMPNIERFPNGKKYELDKYTMFHYLRAQEFEHGKSRIALTNSVNEALLNPSRVYTFFSSDYVKKVNKATEA
AMFLGWVEQLVYDFTDETSEVSTTDKIADITIIIPYIGPALNIGNMLYKDDFVGALIFSGAVILLEFIPEIAIPV
LGTFALVSYIANKVLTVQTIDNALSKRNEKWDEVYKYIVTNWLAKVNTQIDLIRKKMKEALENQAEATKAIINYQ
YNQYTEEEKNNINFNIDDLSSKLNESINKAMININKFLNQCSVSYLMNSMIPYGVKRLEDFDASLKDALLKYIYD
NRGTLIGQVDRLKDKVNNTLSTDIPFQLSKYVDNQRLLSTFTEYIKNIINTSILNLRYESNHLIDLSRYASKINI
GSKVNFDPIDKNQIQLFNLESSKIEVILKKAIVYNSMYENFSTSFWIRIPKYFKKISLNNEYTIINCMENNSGWK
VSLNYGEIIWTLQDTKEIKQRVVFKYSQMINISDYINRWIFVTITNNRLNKSKIYINGRLIDQKPISNLGNIHAS
NKIMFKLDGCRDTHRYIWIKYFNLFDKELNEKEIKDLYDNQSNSGILKDFWGDYLQYDKPYYMLNLYDPNKYVDV
NNVGIRGYMYLKGPRGSVATTNIYLNSSLYRGTKFIIKKYASGNKDNIVRNNDRVYINVVVKNKEYRLATNASQA
GVEKILSALEIPDVGNLSQVVVMKSKNDKGITNKCKMNLQDNNGNDIGFIGFHQFNNIAKLVASNWYNRQIERSS
RTLGCSWEFIPVDDGWGERPL
SEQ ID NO: 26
(Modified BoNT/A1 (N954K, N930K, S955K, Q991K, N1026K, N1052K,
Q1229K, M11441) Polypeptide Sequence)
MPFVNKQFNYKDPVNGVDIAYIKIPNAGQMQPVKAFKIHNKIWVIPERDTFTNPEEGDLNPPPEAKQVPVSYYDS
TYLSTDNEKDNYLKGVTKLFERIYSTDLGRMLLTSIVRGIPFWGGSTIDTELKVIDTNCINVIQPDGSYRSEELN
LVIIGPSADIIQFECKSFGHEVLNLTRNGYGSTQYIRFSPDFTFGFEESLEVDTNPLLGAGKFATDPAVTLAHEL
IHAGHRLYGIAINPNRVFKVNTNAYYEMSGLEVSFEELRTFGGHDAKFIDSLQENEFRLYYYNKFKDIASTINKA
KSIVGTTASLQYMKNVFKEKYLLSEDTSGKFSVDKLKFDKLYKMLTEIYTEDNFVKFFKVLNRKTYLNFDKAVFK
INIVPKVNYTIYDGFNLRNTNLAANFNGQNTEINNMNFTKLKNFTGLFEFYKLLCVRGIITSKTKSLDKGYNKAL
NDLCIKVNNWDLFFSPSEDNFTNDLNKGEEITSDTNIEAAEENISLDLIQQYYLTFNFDNEPENISIENLSSDII
GQLELMPNIERFPNGKKYELDKYTMFHYLRAQEFEHGKSRIALTNSVNEALLNPSRVYTFFSSDYVKKVNKATEA
AMFLGWVEQLVYDFTDETSEVSTTDKIADITIIIPYIGPALNIGNMLYKDDFVGALIFSGAVILLEFIPEIAIPV
LGTFALVSYIANKVLTVQTIDNALSKRNEKWDEVYKYIVTNWLAKVNTQIDLIRKKMKEALENQAEATKAIINYQ
YNQYTEEEKNNINFNIDDLSSKLNESINKAMININKFLNQCSVSYLMNSMIPYGVKRLEDFDASLKDALLKYIYD
NRGTLIGQVDRLKDKVNNTLSTDIPFQLSKYVDNQRLLSTFTEYIKNIINTSILNLRYESNHLIDLSRYASKINI
GSKVNFDPIDKNQIQLFNLESSKIEVILKKAIVYNSMYENFSTSFWIRIPKYFKKISLNNEYTIINCMENNSGWK
VSLNYGEIIWTLQDTKEIKQRVVFKYSQMINISDYINRWIFVTITNNRLNKSKIYINGRLIDQKPISNLGNIHAS
NKIMFKLDGCRDTHRYIWIKYFNLFDKELNEKEIKDLYDNQSNSGILKDFWGDYLQYDKPYYMLNLYDPNKYVDV
NNVGIRGYMYLKGPRGSVITTNIYLNSSLYRGTKFIIKKYASGNKDNIVRNNDRVYINVVVKNKEYRLATNASQA
GVEKILSALEIPDVGNLSQVVVMKSKNDKGITNKCKMNLQDNNGNDIGFIGFHQFNNIAKLVASNWYNRQIERSS
RTLGCSWEFIPVDDGWGERPL
SEQ ID NO: 27
(Modified BoNT/A1 (N954K, N930K, S955K, Q991K, N1026K, N1052K,
Q1229K, M1144 Deletion) Polypeptide Sequence)
MPFVNKQFNYKDPVNGVDIAYIKIPNAGQMQPVKAFKIHNKIWVIPERDTFTNPEEGDLNPPPEAKQVPVSYYDS
TYLSTDNEKDNYLKGVTKLFERIYSTDLGRMLLTSIVRGIPFWGGSTIDTELKVIDTNCINVIQPDGSYRSEELN
LVIIGPSADIIQFECKSFGHEVLNLTRNGYGSTQYIRFSPDFTFGFEESLEVDTNPLLGAGKFATDPAVTLAHEL
IHAGHRLYGIAINPNRVFKVNTNAYYEMSGLEVSFEELRTFGGHDAKFIDSLQENEFRLYYYNKFKDIASTLNKA
KSIVGTTASLQYMKNVFKEKYLLSEDTSGKFSVDKLKFDKLYKMLTEIYTEDNFVKFFKVLNRKTYLNFDKAVFK
INIVPKVNYTIYDGFNLRNTNLAANFNGQNTEINNMNFTKLKNFTGLFEFYKLLCVRGIITSKTKSLDKGYNKAL
NDLCIKVNNWDLFFSPSEDNFTNDLNKGEEITSDTNIEAAEENISLDLIQQYYLTFNFDNEPENISIENLSSDII
GQLELMPNIERFPNGKKYELDKYTMFHYLRAQEFEHGKSRIALTNSVNEALLNPSRVYTFFSSDYVKKVNKATEA
AMFLGWVEQLVYDFTDETSEVSTTDKIADITIIIPYIGPALNIGNMLYKDDFVGALIFSGAVILLEFIPEIAIPV
LGTFALVSYIANKVLTVQTIDNALSKRNEKWDEVYKYIVTNWLAKVNTQIDLIRKKMKEALENQAEATKAIINYQ
YNQYTEEEKNNINFNIDDLSSKLNESINKAMININKFLNQCSVSYLMNSMIPYGVKRLEDFDASLKDALLKYIYD
NRGTLIGQVDRLKDKVNNTLSTDIPFQLSKYVDNQRLLSTFTEYIKNIINTSILNLRYESNHLIDLSRYASKINI
GSKVNFDPIDKNQIQLFNLESSKIEVILKKAIVYNSMYENFSTSFWIRIPKYFKKISLNNEYTIINCMENNSGWK
VSLNYGEIIWTLQDTKEIKQRVVFKYSQMINISDYINRWIFVTITNNRLNKSKIYINGRLIDQKPISNLGNIHAS
NKIMFKLDGCRDTHRYIWIKYFNLFDKELNEKEIKDLYDNQSNSGILKDFWGDYLQYDKPYYMLNLYDPNKYVDV
NNVGIRGYMYLKGPRGSVTTNIYLNSSLYRGTKFIIKKYASGNKDNIVRNNDRVYINVVVKNKEYRLATNASQAG
VEKILSALEIPDVGNLSQVVVMKSKNDKGITNKCKMNLQDNNGNDIGFIGFHQFNNIAKLVASNWYNRQIERSSR
TLGCSWEFIPVDDGWGERPL
SEQ ID NO: 28
(BoNT/A1 (N930K, S955K, Q991K, N1026K, N1052K, Q1229K, N1025K)
Nucleic Acid Sequence)
ATGCCATTCGTCAACAAGCAATTCAACTACAAAGACCCAGTCAACGGCGTCGACATCGCATACATCAAGATTCCG
AACGCCGGTCAAATGCAGCCGGTTAAGGCTTTTAAGATCCACAACAAGATTTGGGTTATCCCGGAGCGTGACACC
TTCACGAACCCGGAAGAAGGCGATCTGAACCCGCCACCGGAAGCGAAGCAAGTCCCTGTCAGCTACTACGATTCG
ACGTACCTGAGCACGGATAACGAAAAAGATAACTACCTGAAAGGTGTGACCAAGCTGTTCGAACGTATCTACAGC
ACGGATCTGGGTCGCATGCTGCTGACTAGCATTGTTCGCGGTATCCCGTTCTGGGGTGGTAGCACGATTGACACC
GAACTGAAGGTTATCGACACTAACTGCATTAACGTTATTCAACCGGATGGTAGCTATCGTAGCGAAGAGCTGAAT
CTGGTCATCATTGGCCCGAGCGCAGACATTATCCAATTCGAGTGCAAGAGCTTTGGTCACGAGGTTCTGAATCTG
ACCCGCAATGGCTATGGTAGCACCCAGTACATTCGTTTTTCGCCGGATTTTACCTTCGGCTTTGAAGAGAGCCTG
GAGGTTGATACCAATCCGTTGCTGGGTGCGGGCAAATTCGCTACCGATCCGGCTGTCACGCTGGCCCATGAACTG
ATCCACGCAGGCCACCGCCTGTACGGCATTGCCATCAACCCAAACCGTGTGTTCAAGGTTAATACGAATGCATAC
TACGAGATGAGCGGCCTGGAAGTCAGCTTCGAAGAACTGCGCACCTTCGGTGGCCATGACGCTAAATTCATTGAC
AGCTTGCAAGAGAATGAGTTCCGTCTGTACTACTATAACAAATTCAAAGACATTGCAAGCACGTTGAACAAGGCC
AAAAGCATCGTTGGTACTACCGCGTCGTTGCAGTATATGAAGAATGTGTTTAAAGAGAAGTACCTGCTGTCCGAG
GATACCTCCGGCAAGTTTAGCGTTGATAAGCTGAAGTTTGACAAACTGTACAAGATGCTGACCGAGATTTACACC
GAGGACAACTTTGTGAAATTCTTCAAAGTGTTGAATCGTAAAACCTATCTGAATTTTGACAAAGCGGTTTTCAAG
ATTAACATCGTGCCGAAGGTGAACTACACCATCTATGACGGTTTTAACCTGCGTAACACCAACCTGGCGGCGAAC
TTTAACGGTCAGAATACGGAAATCAACAACATGAATTTCACGAAGTTGAAGAACTTCACGGGTCTGTTCGAGTTC
TATAAGCTGCTGTGCGTGCGCGGTATCATCACCAGCAAAACCAAAAGCCTGGACAAAGGCTACAACAAGGCGCTG
AATGACCTGTGCATTAAGGTAAACAATTGGGATCTGTTCTTTTCGCCATCCGAAGATAATTTTACCAACGACCTG
AACAAGGGTGAAGAAATCACCAGCGATACGAATATTGAAGCAGCGGAAGAGAATATCAGCCTGGATCTGATCCAG
CAGTACTATCTGACCTTTAACTTCGACAATGAACCGGAGAACATTAGCATTGAGAATCTGAGCAGCGACATTATC
GGTCAGCTGGAACTGATGCCGAATATCGAACGTTTCCCGAACGGCAAAAAGTACGAGCTGGACAAGTACACTATG
TTCCATTACCTGCGTGCACAGGAGTTTGAACACGGTAAAAGCCGTATCGCGCTGACCAACAGCGTTAACGAGGCC
CTGCTGAACCCGAGCCGTGTCTATACCTTCTTCAGCAGCGACTATGTTAAGAAAGTGAACAAAGCCACTGAGGCC
GCGATGTTCCTGGGCTGGGTGGAACAGCTGGTATATGACTTCACGGACGAGACGAGCGAAGTGAGCACTACCGAC
AAAATTGCTGATATTACCATCATTATCCCGTATATTGGTCCGGCACTGAACATTGGCAACATGCTGTACAAAGAC
GATTTTGTGGGTGCCCTGATCTTCTCCGGTGCCGTGATTCTGCTGGAGTTCATTCCGGAGATTGCGATCCCGGTG
TTGGGTACCTTCGCGCTGGTGTCCTACATCGCGAATAAGGTTCTGACGGTTCAGACCATCGATAACGCGCTGTCG
AAACGTAATGAAAAATGGGACGAGGTTTACAAATACATTGTTACGAATTGGCTGGCGAAAGTCAATACCCAGATC
GACCTGATCCGTAAGAAAATGAAAGAGGCGCTGGAGAATCAGGCGGAGGCCACCAAAGCAATTATCAACTACCAA
TACAACCAGTACACGGAAGAAGAGAAGAATAACATTAACTTCAATATCGATGATTTGAGCAGCAAGCTGAATGAA
TCTATCAACAAAGCGATGATCAATATCAACAAGTTTTTGAATCAGTGTAGCGTTTCGTACCTGATGAATAGCATG
ATTCCGTATGGCGTCAAACGTCTGGAGGACTTCGACGCCAGCCTGAAAGATGCGTTGCTGAAATACATTTACGAC
AATCGTGGTACGCTGATTGGCCAAGTTGACCGCTTGAAAGACAAAGTTAACAATACCCTGAGCACCGACATCCCA
TTTCAACTGAGCAAGTATGTTGATAATCAACGTCTGTTGAGCACTTTCACCGAGTATATCAAAAACATCATCAAT
ACTAGCATTCTGAACCTGCGTTACGAGAGCAATCATCTGATTGATCTGAGCCGTTATGCTAGCAAGATCAACATC
GGTAGCAAGGTCAATTTTGACCCGATCGATAAGAACCAGATCCAGCTGTTTAATCTGGAATCGAGCAAAATTGAG
GTTATCCTGAAAAAGGCCATTGTCTACAACTCCATGTACGAGAATTTCTCCACCAGCTTCTGGATTCGCATCCCG
AAATACTTCAACAAGATTAGCCTGAACAACGAGTATACTATCATCAACTGTATGGAGAACAACAGCGGTTGGAAG
GTGTCTCTGAACTATGGTGAGATCATTTGGACCTTGCAGGACACCAAAGAGATCAAGCAGCGCGTCGTGTTCAAG
TACTCTCAAATGATCAACATTTCCGATTACATTAATCGTTGGATCTTCGTGACCATTACGAATAACCGTCTGAAG
AAGAGCAAGATTTACATCAATGGTCGCTTGATCGATCAGAAACCGATTAGCAACCTGGGTAATATCCACGCAAGC
AACAAGATTATGTTCAAATTGGACGGTTGCCGCGATACCCATCGTTATATCTGGATCAAGTATTTCAACCTGTTT
GATAAAGAACTGAATGAGAAGGAGATCAAAGATTTGTATGACAACCAATCTAACAGCGGCATTTTGAAGGACTTC
TGGGGCGATTATCTGCAATACGATAAGCCGTACTATATGCTGAACCTGTATGATCCGAACAAATATGTGGATGTC
AATAATGTGGGTATTCGTGGTTACATGTATTTGAAGGGTCCGCGTGGCAGCGTTATGACGACCAACATTTACCTG
AACTCTAGCCTGTACCGTGGTACGAAATTCATCATTAAGAAATATGCCAGCGGCAACAAAGATAACATTGTGCGT
AATAACGATCGTGTCTACATCAACGTGGTCGTGAAGAATAAAGAGTACCGTCTGGCGACCAACGCTTCGCAGGCG
GGTGTTGAGAAAATTCTGAGCGCGTTGGAGATCCCTGATGTCGGTAATCTGAGCCAAGTCGTGGTTATGAAGAGC
AAGAACGACAAGGGTATCACTAACAAGTGCAAGATGAACCTGCAAGACAACAATGGTAACGACATCGGCTTTATT
GGTTTCCACCAGTTCAACAATATTGCTAAACTGGTAGCGAGCAATTGGTACAATCGTCAGATTGAGCGCAGCAGC
CGTACTTTGGGCTGTAGCTGGGAGTTTATCCCGGTCGATGATGGTTGGGGCGAACGTCCGCTG
SEQ ID NO: 29
(BoNT/A1 (N930K, S955K, Q991K, N1026K, N1052K, Q1229K, N1025K)
Polypeptide Sequence)
MPFVNKQFNYKDPVNGVDIAYIKIPNAGQMQPVKAFKIHNKIWVIPERDTFTNPEEGDLNPPPEAKQVPVSYYDS
TYLSTDNEKDNYLKGVTKLFERIYSTDLGRMLLTSIVRGIPFWGGSTIDTELKVIDTNCINVIQPDGSYRSEELN
LVIIGPSADIIQFECKSFGHEVLNLTRNGYGSTQYIRFSPDFTFGFEESLEVDTNPLLGAGKFATDPAVTLAHEL
IHAGHRLYGIAINPNRVFKVNTNAYYEMSGLEVSFEELRTFGGHDAKFIDSLQENEFRLYYYNKFKDIASTINKA
KSIVGTTASLQYMKNVFKEKYLLSEDTSGKFSVDKLKFDKLYKMLTEIYTEDNFVKFFKVLNRKTYLNFDKAVFK
INIVPKVNYTIYDGFNLRNTNLAANFNGQNTEINNMNFTKLKNFTGLFEFYKLLCVRGIITSKTKSLDKGYNKAL
NDLCIKVNNWDLFFSPSEDNFTNDLNKGEEITSDTNIEAAEENISLDLIQQYYLTFNFDNEPENISIENLSSDII
GQLELMPNIERFPNGKKYELDKYTMFHYLRAQEFEHGKSRIALTNSVNEALLNPSRVYTFFSSDYVKKVNKATEA
AMFLGWVEQLVYDFTDETSEVSTTDKIADITIIIPYIGPALNIGNMLYKDDFVGALIFSGAVILLEFIPEIAIPV
LGTFALVSYIANKVLTVQTIDNALSKRNEKWDEVYKYIVTNWLAKVNTQIDLIRKKMKEALENQAEATKAIINYQ
YNQYTEEEKNNINFNIDDLSSKLNESINKAMININKFLNQCSVSYLMNSMIPYGVKRLEDFDASLKDALLKYIYD
NRGTLIGQVDRLKDKVNNTLSTDIPFQLSKYVDNQRLLSTFTEYIKNIINTSILNLRYESNHLIDLSRYASKINI
GSKVNFDPIDKNQIQLFNLESSKIEVILKKAIVYNSMYENFSTSFWIRIPKYFNKISLNNEYTIINCMENNSGWK
VSLNYGEIIWTLQDTKEIKQRVVFKYSQMINISDYINRWIFVTITNNRLKKSKIYINGRLIDQKPISNLGNIHAS
NKIMFKLDGCRDTHRYIWIKYFNLFDKELNEKEIKDLYDNQSNSGILKDFWGDYLQYDKPYYMLNLYDPNKYVDV
NNVGIRGYMYLKGPRGSVMTTNIYLNSSLYRGTKFIIKKYASGNKDNIVRNNDRVYINVVVKNKEYRLATNASQA
GVEKILSALEIPDVGNLSQVVVMKSKNDKGITNKCKMNLQDNNGNDIGFIGFHQFNNIAKLVASNWYNRQIERSS
RTLGCSWEFIPVDDGWGERPL
SEQ ID NO: 30
(Modified BoNT/A1 (N930K, S955K, Q991K, N1026K, N1052K, Q1229K,
N1025K, M1144V) Polypeptide Sequence)
MPFVNKQFNYKDPVNGVDIAYIKIPNAGQMQPVKAFKIHNKIWVIPERDTFTNPEEGDLNPPPEAKQVPVSYYDS
TYLSTDNEKDNYLKGVTKLFERIYSTDLGRMLLTSIVRGIPFWGGSTIDTELKVIDTNCINVIQPDGSYRSEELN
LVIIGPSADIIQFECKSFGHEVLNLTRNGYGSTQYIRFSPDFTFGFEESLEVDTNPLLGAGKFATDPAVTLAHEL
IHAGHRLYGIAINPNRVFKVNTNAYYEMSGLEVSFEELRTFGGHDAKFIDSLQENEFRLYYYNKFKDIASTLNKA
KSIVGTTASLQYMKNVFKEKYLLSEDTSGKFSVDKLKFDKLYKMLTEIYTEDNFVKFFKVLNRKTYLNFDKAVFK
INIVPKVNYTIYDGFNLRNTNLAANFNGQNTEINNMNFTKLKNFTGLFEFYKLLCVRGIITSKTKSLDKGYNKAL
NDLCIKVNNWDLFFSPSEDNFTNDLNKGEEITSDTNIEAAEENISLDLIQQYYLTFNFDNEPENISIENLSSDII
GQLELMPNIERFPNGKKYELDKYTMFHYLRAQEFEHGKSRIALTNSVNEALLNPSRVYTFFSSDYVKKVNKATEA
AMFLGWVEQLVYDFTDETSEVSTTDKIADITIIIPYIGPALNIGNMLYKDDFVGALIFSGAVILLEFIPEIAIPV
LGTFALVSYIANKVLTVQTIDNALSKRNEKWDEVYKYIVTNWLAKVNTQIDLIRKKMKEALENQAEATKAIINYQ
YNQYTEEEKNNINFNIDDLSSKLNESINKAMININKFLNQCSVSYLMNSMIPYGVKRLEDFDASLKDALLKYIYD
NRGTLIGQVDRLKDKVNNTLSTDIPFQLSKYVDNQRLLSTFTEYIKNIINTSILNLRYESNHLIDLSRYASKINI
GSKVNFDPIDKNQIQLFNLESSKIEVILKKAIVYNSMYENFSTSFWIRIPKYFNKISLNNEYTIINCMENNSGWK
VSLNYGEIIWTLQDTKEIKQRVVFKYSQMINISDYINRWIFVTITNNRLKKSKIYINGRLIDQKPISNLGNIHAS
NKIMFKLDGCRDTHRYIWIKYFNLFDKELNEKEIKDLYDNQSNSGILKDFWGDYLQYDKPYYMLNLYDPNKYVDV
NNVGIRGYMYLKGPRGSVVTTNIYLNSSLYRGTKFIIKKYASGNKDNIVRNNDRVYINVVVKNKEYRLATNASQA
GVEKILSALEIPDVGNLSQVVVMKSKNDKGITNKCKMNLQDNNGNDIGFIGFHQFNNIAKLVASNWYNRQIERSS
RTLGCSWEFIPVDDGWGERPL
SEQ ID NO: 31
(Modified BoNT/A1 (N930K, S955K, Q991K, N1026K, N1052K, Q1229K,
N1025K, M1144G) Polypeptide Sequence)
MPFVNKQFNYKDPVNGVDIAYIKIPNAGQMQPVKAFKIHNKIWVIPERDTFTNPEEGDLNPPPEAKQVPVSYYDS
TYLSTDNEKDNYLKGVTKLFERIYSTDLGRMLLTSIVRGIPFWGGSTIDTELKVIDTNCINVIQPDGSYRSEELN
LVIIGPSADIIQFECKSFGHEVLNLTRNGYGSTQYIRFSPDFTFGFEESLEVDTNPLLGAGKFATDPAVTLAHEL
IHAGHRLYGIAINPNRVFKVNTNAYYEMSGLEVSFEELRTFGGHDAKFIDSLQENEFRLYYYNKFKDIASTLNKA
KSIVGTTASLQYMKNVFKEKYLLSEDTSGKFSVDKLKFDKLYKMLTEIYTEDNFVKFFKVLNRKTYLNFDKAVFK
INIVPKVNYTIYDGFNLRNTNLAANFNGQNTEINNMNFTKLKNFTGLFEFYKLLCVRGIITSKTKSLDKGYNKAL
NDLCIKVNNWDLFFSPSEDNFTNDLNKGEEITSDTNIEAAEENISLDLIQQYYLTFNFDNEPENISIENLSSDII
GQLELMPNIERFPNGKKYELDKYTMFHYLRAQEFEHGKSRIALTNSVNEALLNPSRVYTFFSSDYVKKVNKATEA
AMFLGWVEQLVYDFTDETSEVSTTDKIADITIIIPYIGPALNIGNMLYKDDFVGALIFSGAVILLEFIPEIAIPV
LGTFALVSYIANKVLTVQTIDNALSKRNEKWDEVYKYIVTNWLAKVNTQIDLIRKKMKEALENQAEATKAIINYQ
YNQYTEEEKNNINFNIDDLSSKLNESINKAMININKFLNQCSVSYLMNSMIPYGVKRLEDFDASLKDALLKYIYD
NRGTLIGQVDRLKDKVNNTLSTDIPFQLSKYVDNQRLLSTFTEYIKNIINTSILNLRYESNHLIDLSRYASKINI
GSKVNFDPIDKNQIQLFNLESSKIEVILKKAIVYNSMYENFSTSFWIRIPKYFNKISLNNEYTIINCMENNSGWK
VSLNYGEIIWTLQDTKEIKQRVVFKYSQMINISDYINRWIFVTITNNRLKKSKIYINGRLIDQKPISNLGNIHAS
NKIMFKLDGCRDTHRYIWIKYFNLFDKELNEKEIKDLYDNQSNSGILKDFWGDYLQYDKPYYMLNLYDPNKYVDV
NNVGIRGYMYLKGPRGSVGTTNIYLNSSLYRGTKFIIKKYASGNKDNIVRNNDRVYINVVVKNKEYRLATNASQA
GVEKILSALEIPDVGNLSQVVVMKSKNDKGITNKCKMNLQDNNGNDIGFIGFHQFNNIAKLVASNWYNRQIERSS
RTLGCSWEFIPVDDGWGERPL
SEQ ID NO: 32
(Modified BoNT/A1 (N930K, S955K, Q991K, N1026K, N1052K, Q1229K,
N1025K, M1144L) Polypeptide Sequence)
MPFVNKQFNYKDPVNGVDIAYIKIPNAGQMQPVKAFKIHNKIWVIPERDTFTNPEEGDLNPPPEAKQVPVSYYDS
TYLSTDNEKDNYLKGVTKLFERIYSTDLGRMLLTSIVRGIPFWGGSTIDTELKVIDTNCINVIQPDGSYRSEELN
LVIIGPSADIIQFECKSFGHEVLNLTRNGYGSTQYIRFSPDFTFGFEESLEVDTNPLLGAGKFATDPAVTLAHEL
IHAGHRLYGIAINPNRVFKVNTNAYYEMSGLEVSFEELRTFGGHDAKFIDSLQENEFRLYYYNKFKDIASTLNKA
KSIVGTTASLQYMKNVFKEKYLLSEDTSGKFSVDKLKFDKLYKMLTEIYTEDNFVKFFKVLNRKTYLNFDKAVFK
INIVPKVNYTIYDGFNLRNTNLAANFNGQNTEINNMNFTKLKNFTGLFEFYKLLCVRGIITSKTKSLDKGYNKAL
NDLCIKVNNWDLFFSPSEDNFTNDLNKGEEITSDTNIEAAEENISLDLIQQYYLTFNFDNEPENISIENLSSDII
GQLELMPNIERFPNGKKYELDKYTMFHYLRAQEFEHGKSRIALTNSVNEALLNPSRVYTFFSSDYVKKVNKATEA
AMFLGWVEQLVYDFTDETSEVSTTDKIADITIIIPYIGPALNIGNMLYKDDFVGALIFSGAVILLEFIPEIAIPV
LGTFALVSYIANKVLTVQTIDNALSKRNEKWDEVYKYIVTNWLAKVNTQIDLIRKKMKEALENQAEATKAIINYQ
YNQYTEEEKNNINFNIDDLSSKLNESINKAMININKFLNQCSVSYLMNSMIPYGVKRLEDFDASLKDALLKYIYD
NRGTLIGQVDRLKDKVNNTLSTDIPFQLSKYVDNQRLLSTFTEYIKNIINTSILNLRYESNHLIDLSRYASKINI
GSKVNFDPIDKNQIQLFNLESSKIEVILKKAIVYNSMYENFSTSFWIRIPKYFNKISLNNEYTIINCMENNSGWK
VSLNYGEIIWTLQDTKEIKQRVVFKYSQMINISDYINRWIFVTITNNRLKKSKIYINGRLIDQKPISNLGNIHAS
NKIMFKLDGCRDTHRYIWIKYFNLFDKELNEKEIKDLYDNQSNSGILKDFWGDYLQYDKPYYMLNLYDPNKYVDV
NNVGIRGYMYLKGPRGSVLTTNIYLNSSLYRGTKFIIKKYASGNKDNIVRNNDRVYINVVVKNKEYRLATNASQA
GVEKILSALEIPDVGNLSQVVVMKSKNDKGITNKCKMNLQDNNGNDIGFIGFHQFNNIAKLVASNWYNRQIERSS
RTLGCSWEFIPVDDGWGERPL
SEQ ID NO: 33
(Modified BoNT/A1 (N930K, S955K, Q991K, N1026K, N1052K, Q1229K,
N1025K, M1144T) Polypeptide Sequence)
MPFVNKQFNYKDPVNGVDIAYIKIPNAGQMQPVKAFKIHNKIWVIPERDTFTNPEEGDLNPPPEAKQVPVSYYDS
TYLSTDNEKDNYLKGVTKLFERIYSTDLGRMLLTSIVRGIPFWGGSTIDTELKVIDTNCINVIQPDGSYRSEELN
LVIIGPSADIIQFECKSFGHEVLNLTRNGYGSTQYIRFSPDFTFGFEESLEVDTNPLLGAGKFATDPAVTLAHEL
IHAGHRLYGIAINPNRVFKVNTNAYYEMSGLEVSFEELRTFGGHDAKFIDSLQENEFRLYYYNKFKDIASTINKA
KSIVGTTASLQYMKNVFKEKYLLSEDTSGKFSVDKLKFDKLYKMLTEIYTEDNFVKFFKVLNRKTYLNFDKAVFK
INIVPKVNYTIYDGFNLRNTNLAANFNGQNTEINNMNFTKLKNFTGLFEFYKLLCVRGIITSKTKSLDKGYNKAL
NDLCIKVNNWDLFFSPSEDNFTNDLNKGEEITSDTNIEAAEENISLDLIQQYYLTFNFDNEPENISIENLSSDII
GQLELMPNIERFPNGKKYELDKYTMFHYLRAQEFEHGKSRIALTNSVNEALLNPSRVYTFFSSDYVKKVNKATEA
AMFLGWVEQLVYDFTDETSEVSTTDKIADITIIIPYIGPALNIGNMLYKDDFVGALIFSGAVILLEFIPEIAIPV
LGTFALVSYIANKVLTVQTIDNALSKRNEKWDEVYKYIVTNWLAKVNTQIDLIRKKMKEALENQAEATKAIINYQ
YNQYTEEEKNNINFNIDDLSSKLNESINKAMININKFLNQCSVSYLMNSMIPYGVKRLEDFDASLKDALLKYIYD
NRGTLIGQVDRLKDKVNNTLSTDIPFQLSKYVDNQRLLSTFTEYIKNIINTSILNLRYESNHLIDLSRYASKINI
GSKVNFDPIDKNQIQLFNLESSKIEVILKKAIVYNSMYENFSTSFWIRIPKYFNKISLNNEYTIINCMENNSGWK
VSLNYGEIIWTLQDTKEIKQRVVFKYSQMINISDYINRWIFVTITNNRLKKSKIYINGRLIDQKPISNLGNIHAS
NKIMFKLDGCRDTHRYIWIKYFNLFDKELNEKEIKDLYDNQSNSGILKDFWGDYLQYDKPYYMLNLYDPNKYVDV
NNVGIRGYMYLKGPRGSVTTTNIYLNSSLYRGTKFIIKKYASGNKDNIVRNNDRVYINVVVKNKEYRLATNASQA
GVEKILSALEIPDVGNLSQVVVMKSKNDKGITNKCKMNLQDNNGNDIGFIGFHQFNNIAKLVASNWYNRQIERSS
RTLGCSWEFIPVDDGWGERPL
SEQ ID NO: 34
(Modified BoNT/A1 (N930K, S955K, Q991K, N1026K, N1052K, Q1229K,
N1025K, M1144A) Polypeptide Sequence)
MPFVNKQFNYKDPVNGVDIAYIKIPNAGQMQPVKAFKIHNKIWVIPERDTFTNPEEGDLNPPPEAKQVPVSYYDS
TYLSTDNEKDNYLKGVTKLFERIYSTDLGRMLLTSIVRGIPFWGGSTIDTELKVIDTNCINVIQPDGSYRSEELN
LVIIGPSADIIQFECKSFGHEVLNLTRNGYGSTQYIRFSPDFTFGFEESLEVDTNPLLGAGKFATDPAVTLAHEL
IHAGHRLYGIAINPNRVFKVNTNAYYEMSGLEVSFEELRTFGGHDAKFIDSLQENEFRLYYYNKFKDIASTLNKA
KSIVGTTASLQYMKNVFKEKYLLSEDTSGKFSVDKLKFDKLYKMLTEIYTEDNFVKFFKVLNRKTYLNFDKAVFK
INIVPKVNYTIYDGFNLRNTNLAANFNGQNTEINNMNFTKLKNFTGLFEFYKLLCVRGIITSKTKSLDKGYNKAL
NDLCIKVNNWDLFFSPSEDNFTNDLNKGEEITSDTNIEAAEENISLDLIQQYYLTFNFDNEPENISIENLSSDII
GQLELMPNIERFPNGKKYELDKYTMFHYLRAQEFEHGKSRIALTNSVNEALLNPSRVYTFFSSDYVKKVNKATEA
AMFLGWVEQLVYDFTDETSEVSTTDKIADITIIIPYIGPALNIGNMLYKDDFVGALIFSGAVILLEFIPEIAIPV
LGTFALVSYIANKVLTVQTIDNALSKRNEKWDEVYKYIVTNWLAKVNTQIDLIRKKMKEALENQAEATKAIINYQ
YNQYTEEEKNNINFNIDDLSSKLNESINKAMININKFLNQCSVSYLMNSMIPYGVKRLEDFDASLKDALLKYIYD
NRGTLIGQVDRLKDKVNNTLSTDIPFQLSKYVDNQRLLSTFTEYIKNIINTSILNLRYESNHLIDLSRYASKINI
GSKVNFDPIDKNQIQLFNLESSKIEVILKKAIVYNSMYENFSTSFWIRIPKYFNKISLNNEYTIINCMENNSGWK
VSLNYGEIIWTLQDTKEIKQRVVFKYSQMINISDYINRWIFVTITNNRLKKSKIYINGRLIDQKPISNLGNIHAS
NKIMFKLDGCRDTHRYIWIKYFNLFDKELNEKEIKDLYDNQSNSGILKDFWGDYLQYDKPYYMLNLYDPNKYVDV
NNVGIRGYMYLKGPRGSVATTNIYLNSSLYRGTKFIIKKYASGNKDNIVRNNDRVYINVVVKNKEYRLATNASQA
GVEKILSALEIPDVGNLSQVVVMKSKNDKGITNKCKMNLQDNNGNDIGFIGFHQFNNIAKLVASNWYNRQIERSS
RTLGCSWEFIPVDDGWGERPL
SEQ ID NO: 35
(Modified BoNT/A1 (N930K, S955K, Q991K, N1026K, N1052K, Q1229K,
N1025K, M11441) Polypeptide Sequence)
MPFVNKQFNYKDPVNGVDIAYIKIPNAGQMQPVKAFKIHNKIWVIPERDTFTNPEEGDLNPPPEAKQVPVSYYDS
TYLSTDNEKDNYLKGVTKLFERIYSTDLGRMLLTSIVRGIPFWGGSTIDTELKVIDTNCINVIQPDGSYRSEELN
LVIIGPSADIIQFECKSFGHEVLNLTRNGYGSTQYIRFSPDFTFGFEESLEVDTNPLLGAGKFATDPAVTLAHEL
IHAGHRLYGIAINPNRVFKVNTNAYYEMSGLEVSFEELRTFGGHDAKFIDSLQENEFRLYYYNKFKDIASTLNKA
KSIVGTTASLQYMKNVFKEKYLLSEDTSGKFSVDKLKFDKLYKMLTEIYTEDNFVKFFKVLNRKTYLNFDKAVFK
INIVPKVNYTIYDGFNLRNTNLAANFNGQNTEINNMNFTKLKNFTGLFEFYKLLCVRGIITSKTKSLDKGYNKAL
NDLCIKVNNWDLFFSPSEDNFTNDLNKGEEITSDTNIEAAEENISLDLIQQYYLTFNFDNEPENISIENLSSDII
GQLELMPNIERFPNGKKYELDKYTMFHYLRAQEFEHGKSRIALTNSVNEALLNPSRVYTFFSSDYVKKVNKATEA
AMFLGWVEQLVYDFTDETSEVSTTDKIADITIIIPYIGPALNIGNMLYKDDFVGALIFSGAVILLEFIPEIAIPV
LGTFALVSYIANKVLTVQTIDNALSKRNEKWDEVYKYIVTNWLAKVNTQIDLIRKKMKEALENQAEATKAIINYQ
YNQYTEEEKNNINFNIDDLSSKLNESINKAMININKFLNQCSVSYLMNSMIPYGVKRLEDFDASLKDALLKYIYD
NRGTLIGQVDRLKDKVNNTLSTDIPFQLSKYVDNQRLLSTFTEYIKNIINTSILNLRYESNHLIDLSRYASKINI
GSKVNFDPIDKNQIQLFNLESSKIEVILKKAIVYNSMYENFSTSFWIRIPKYFNKISLNNEYTIINCMENNSGWK
VSLNYGEIIWTLQDTKEIKQRVVFKYSQMINISDYINRWIFVTITNNRLKKSKIYINGRLIDQKPISNLGNIHAS
NKIMFKLDGCRDTHRYIWIKYFNLFDKELNEKEIKDLYDNQSNSGILKDFWGDYLQYDKPYYMLNLYDPNKYVDV
NNVGIRGYMYLKGPRGSVITTNIYLNSSLYRGTKFIIKKYASGNKDNIVRNNDRVYINVVVKNKEYRLATNASQA
GVEKILSALEIPDVGNLSQVVVMKSKNDKGITNKCKMNLQDNNGNDIGFIGFHQFNNIAKLVASNWYNRQIERSS
RTLGCSWEFIPVDDGWGERPL
SEQ ID NO: 36
(Modified BoNT/A1 (N930K, S955K, Q991K, N1026K, N1052K, Q1229K,
N1025K, M1144 Deletion) Polypeptide Sequence)
MPFVNKQFNYKDPVNGVDIAYIKIPNAGQMQPVKAFKIHNKIWVIPERDTFTNPEEGDLNPPPEAKQVPVSYYDS
TYLSTDNEKDNYLKGVTKLFERIYSTDLGRMLLTSIVRGIPFWGGSTIDTELKVIDTNCINVIQPDGSYRSEELN
LVIIGPSADIIQFECKSFGHEVLNLTRNGYGSTQYIRFSPDFTFGFEESLEVDTNPLLGAGKFATDPAVTLAHEL
IHAGHRLYGIAINPNRVFKVNTNAYYEMSGLEVSFEELRTFGGHDAKFIDSLQENEFRLYYYNKFKDIASTLNKA
KSIVGTTASLQYMKNVFKEKYLLSEDTSGKFSVDKLKFDKLYKMLTEIYTEDNFVKFFKVLNRKTYLNFDKAVFK
INIVPKVNYTIYDGFNLRNTNLAANFNGQNTEINNMNFTKLKNFTGLFEFYKLLCVRGIITSKTKSLDKGYNKAL
NDLCIKVNNWDLFFSPSEDNFTNDLNKGEEITSDTNIEAAEENISLDLIQQYYLTFNFDNEPENISIENLSSDII
GQLELMPNIERFPNGKKYELDKYTMFHYLRAQEFEHGKSRIALTNSVNEALLNPSRVYTFFSSDYVKKVNKATEA
AMFLGWVEQLVYDFTDETSEVSTTDKIADITIIIPYIGPALNIGNMLYKDDFVGALIFSGAVILLEFIPEIAIPV
LGTFALVSYIANKVLTVQTIDNALSKRNEKWDEVYKYIVTNWLAKVNTQIDLIRKKMKEALENQAEATKAIINYQ
YNQYTEEEKNNINFNIDDLSSKLNESINKAMININKFLNQCSVSYLMNSMIPYGVKRLEDFDASLKDALLKYIYD
NRGTLIGQVDRLKDKVNNTLSTDIPFQLSKYVDNQRLLSTFTEYIKNIINTSILNLRYESNHLIDLSRYASKINI
GSKVNFDPIDKNQIQLFNLESSKIEVILKKAIVYNSMYENFSTSFWIRIPKYFNKISLNNEYTIINCMENNSGWK
VSLNYGEIIWTLQDTKEIKQRVVFKYSQMINISDYINRWIFVTITNNRLKKSKIYINGRLIDQKPISNLGNIHAS
NKIMFKLDGCRDTHRYIWIKYFNLFDKELNEKEIKDLYDNQSNSGILKDFWGDYLQYDKPYYMLNLYDPNKYVDV
NNVGIRGYMYLKGPRGSVTTNIYLNSSLYRGTKFIIKKYASGNKDNIVRNNDRVYINVVVKNKEYRLATNASQAG
VEKILSALEIPDVGNLSQVVVMKSKNDKGITNKCKMNLQDNNGNDIGFIGFHQFNNIAKLVASNWYNRQIERSSR
TLGCSWEFIPVDDGWGERPL
SEQ ID NO: 37
(BoNT/A1 (N1188R, D1213R, G1215R, N1216R, N1242R, N1243R, S1274R,
T1277R) Nucleic Acid Sequence)
ATGCCATTCGTCAACAAGCAATTCAACTACAAAGACCCAGTCAACGGCGTCGACATCGCATACATCAAGATTCCG
AACGCCGGTCAAATGCAGCCGGTTAAGGCTTTTAAGATCCACAACAAGATTTGGGTTATCCCGGAGCGTGACACC
TTCACGAACCCGGAAGAAGGCGATCTGAACCCGCCACCGGAAGCGAAGCAAGTCCCTGTCAGCTACTACGATTCG
ACGTACCTGAGCACGGATAACGAAAAAGATAACTACCTGAAAGGTGTGACCAAGCTGTTCGAACGTATCTACAGC
ACGGATCTGGGTCGCATGCTGCTGACTAGCATTGTTCGCGGTATCCCGTTCTGGGGTGGTAGCACGATTGACACC
GAACTGAAGGTTATCGACACTAACTGCATTAACGTTATTCAACCGGATGGTAGCTATCGTAGCGAAGAGCTGAAT
CTGGTCATCATTGGCCCGAGCGCAGACATTATCCAATTCGAGTGCAAGAGCTTTGGTCACGAGGTTCTGAATCTG
ACCCGCAATGGCTATGGTAGCACCCAGTACATTCGTTTTTCGCCGGATTTTACCTTCGGCTTTGAAGAGAGCCTG
GAGGTTGATACCAATCCGTTGCTGGGTGCGGGCAAATTCGCTACCGATCCGGCTGTCACGCTGGCCCATGAACTG
ATCCACGCAGGCCACCGCCTGTACGGCATTGCCATCAACCCAAACCGTGTGTTCAAGGTTAATACGAATGCATAC
TACGAGATGAGCGGCCTgGAAGTCAGCTTCGAAGAACTGCGCACCTTCGGTGGCCATGACGCTAAATTCATTGAC
AGCTTGCAAGAGAATGAGTTCCGTCTGTACTACTATAACAAATTCAAAGACATTGCAAGCACGTTGAACAAGGCC
AAAAGCATCGTTGGTACTACCGCGTCGTTGCAGTATATGAAGAATGTGTTTAAAGAGAAGTACCTGCTGTCCGAG
GATACCTCCGGCAAGTTTAGCGTTGATAAGCTGAAGTTTGACAAACTGTACAAGATGCTGACCGAGATTTACACC
GAGGACAACTTTGTGAAATTCTTCAAaGTGTTGAATCGTAAAACCTATCTGAATTTTGACAAAGCGGTTTTCaAG
ATTAACATCGTGCCGAAGGTGAACTACACCATCTATGACGGTTTTAACCTGCGTAACACCAACCTGGCGGCGAAC
TTTAACGGTCAGAATACGGAAATCAACAACATGAATTTCACGAAGTTGAAGAACTTCACGGGTCTGTTCGAGTTC
TATAAGCTGCTGTGCGTGCGCGGTATCATCACCAGCAAAACCAAAAGCCTGGACAAAGGCTACAACAAGGCGCTG
AATGACCTGTGCATTAAGGTAAACAATTGGGATCTGTTCTTTTCGCCATCCGAAGATAATTTTACCAACGACCTG
AACAAGGGTGAAGAAATCACCAGCGATACGAATATTGAAGCAGCGGAAGAGAATATCAGCCTGGATCTGATCCAG
CAGTACTATCTGACCTTTAACTTCGACAATGAACCGGAGAACATTAGCATTGAGAATCTGAGCAGCGACATTATC
GGTCAGCTGGAACTGATGCCGAATATCGAACGTTTCCCGAACGGCAAAAAGTACGAGCTGGACAAGTACACTATG
TTCCATTACCTGCGTGCACAGGAGTTTGAACACGGTAAAAGCCGTATCGCGCTGACCAACAGCGTTAACGAGGCC
CTGCTGAACCCGAGCCGTGTCTATACCTTCTTCAGCAGCGACTATGTTAAGAAAGTGAACAAAGCCACTGAGGCC
GCGATGTTCCTGGGCTGGGTGGAACAGCTGGTATATGACTTCACGGACGAGACGAGCGAAGTGAGCACTACCGAC
AAAaTTGCTGATaTTACCATCATTATCCCGTATATTGGTCCGGCACTGAACATTGGCAACATGCTGTACAAAGAC
GATTTTGTGGGTGCCCTGATCTTCTCCGGTGCCGTGATTCTGCTGGAGTTCATTCCGGAGATTGCGATCCCGGTG
TTGGGTACCTTCGCGCTGGTGTCCTACATCGCGAATAAGGTTCTGACGGTTCAGACCATCGATAACGCGCTGTCG
AAACGTAATGAAAAATGGGACGAGGTTTACAAATACATTGTTACGAATTGGCTGGCGAAAGTCaATACCCAGATC
GACCTGATCCGTAAGAAAATGAAAGAGGCGCTGGAGAATCAGGCGGAGGCCACCAAAGCAATTATCAACTACCAA
TACAACCAGTACACGGAAGAAGAGAAGAATAACATTAACTTCAATATCGATGATTTGAGCAGCAAGCTGAATGAA
TCTATCAACAAAGCGATGATCAATATCAACAAGTTTTTGAATCAGTGTAGCGTTTCGTACCTGATGAATAGCATG
ATTCCGTATGGCGTCAAACGTCTGGAGGACTTCGACGCCAGCCTGAAAGATGCGTTGCTGAAATACATTTACGAC
AATCGTGGTACGCTGATTGGCCAAGTTGACCGCTTGAAAGACAAAGTTAACAATACCCTGAGCACCGACATCCCA
TTTCAACTGAGCAAGTATGTTGATAATCAACGTCTGTTGAGCACTTTCACCGAGTATATCAAAAACATCATCAAT
ACTAGCATTCTGAACCTGCGTTACGAGAGCAATCATCTGATtGATCTGAGCCGTTATGCAAGCAAGATCAACATC
GGTAGCAAGGTCAATTTTGACCCGATCGATAAGAACCAGATCCAGCTGTTTAATCTGGAATCGAGCAAAATTGAG
GTTATCCTGAAAAACGCCATTGTCTACAACTCCATGTACGAGAATTTCTCCACCAGCTTCTGGATTCGCATCCCG
AAATACTTCAACAGCATTAGCCTGAACAACGAGTATACTATCATCAACTGTATGGAGAACAACAGCGGTTGGAAG
GTGTCTCTGAACTATGGTGAGATCATTTGGACCTTGCAGGACACCCAAGAGATCAAGCAGCGCGTCGTGTTCAAG
TACTCTCAAATGATCAACATTTCCGATTACATTAATCGTTGGATCTTCGTGACCATTACGAATAACCGTCTGAAT
AACAGCAAGATTTACATCAATGGTCGCTTGATCGATCAGAAACCGATTAGCAACCTGGGTAATATCCACGCAAGC
AACAACATTATGTTCAAATTGGACGGTTGCCGCGATACCCATCGTTATATCTGGATCAAGTATTTCAACCTGTTT
GATAAAGAACTGAATGAGAAGGAGATCAAAGATTTGTATGACAACCAATCTAACAGCGGCATTTTGAAGGACTTC
TGGGGCGATTATCTGCAATACGATAAGCCGTACTATATGCTGAACCTGTATGATCCGAACAAATATGTGGATGTC
AATAATGTGGGTATTCGTGGTTACATGTATTTGAAGGGTCCGCGTGGCAGCGTTATGACGACCAACATTTACCTG
AACTCTAGCCTGTACCGTGGTACGAAATTCATCATTAAGAAATATGCCAGCGGCAACAAAGATAACATTGTGCGT
AATAACGATCGTGTCTACATCAACGTGGTCGTGAAGCGTAAAGAGTACCGTCTGGCGACCAACGCTTCGCAGGCG
GGTGTTGAGAAAATTCTGAGCGCGTTGGAGATCCCTCGTGTCCGTCGTCTGAGCCAAGTCGTGGTTATGAAGAGC
AAGAACGACCAGGGTATCACTAACAAGTGCAAGATGAACCTGCAAGACCGTCGTGGTAACGACATCGGCTTTATT
GGTTTCCACCAGTTCAACAATATTGCTAAACTGGTAGCGAGCAATTGGTACAATCGTCAGATTGAGCGCCGTAGC
CGTCGTTTGGGCTGTAGCTGGGAGTTTATCCCGGTCGATGATGGTTGGGGCGAACGTCCGCTG
SEQ ID NO: 38
(BoNT/A1 (N1188R, D1213R, G1215R, N1216R, N1242R, N1243R, S1274R,
T1277R) Polypeptide Sequence)
MPFVNKQFNYKDPVNGVDIAYIKIPNAGQMQPVKAFKIHNKIWVIPERDTFTNPEEGDLNPPPEAKQVPVSYYDS
TYLSTDNEKDNYLKGVTKLFERIYSTDLGRMLLTSIVRGIPFWGGSTIDTELKVIDTNCINVIQPDGSYRSEELN
LVIIGPSADIIQFECKSFGHEVLNLTRNGYGSTQYIRFSPDFTFGFEESLEVDTNPLLGAGKFATDPAVTLAHEL
IHAGHRLYGIAINPNRVFKVNTNAYYEMSGLEVSFEELRTFGGHDAKFIDSLQENEFRLYYYNKFKDIASTINKA
KSIVGTTASLQYMKNVFKEKYLLSEDTSGKFSVDKLKFDKLYKMLTEIYTEDNFVKFFKVLNRKTYLNFDKAVFK
INIVPKVNYTIYDGFNLRNTNLAANFNGQNTEINNMNFTKLKNFTGLFEFYKLLCVRGIITSKTKSLDKGYNKAL
NDLCIKVNNWDLFFSPSEDNFTNDLNKGEEITSDTNIEAAEENISLDLIQQYYLTFNFDNEPENISIENLSSDII
GQLELMPNIERFPNGKKYELDKYTMFHYLRAQEFEHGKSRIALTNSVNEALLNPSRVYTFFSSDYVKKVNKATEA
AMFLGWVEQLVYDFTDETSEVSTTDKIADITIIIPYIGPALNIGNMLYKDDFVGALIFSGAVILLEFIPEIAIPV
LGTFALVSYIANKVLTVQTIDNALSKRNEKWDEVYKYIVTNWLAKVNTQIDLIRKKMKEALENQAEATKAIINYQ
YNQYTEEEKNNINFNIDDLSSKLNESINKAMININKFLNQCSVSYLMNSMIPYGVKRLEDFDASLKDALLKYIYD
NRGTLIGQVDRLKDKVNNTLSTDIPFQLSKYVDNQRLLSTFTEYIKNIINTSILNLRYESNHLIDLSRYASKINI
GSKVNFDPIDKNQIQLENLESSKIEVILKNAIVYNSMYENFSTSFWIRIPKYFNSISLNNEYTIINCMENNSGWK
VSLNYGEIIWTLQDTQEIKQRVVFKYSQMINISDYINRWIFVTITNNRLNNSKIYINGRLIDQKPISNLGNIHAS
NNIMFKLDGCRDTHRYIWIKYFNLFDKELNEKEIKDLYDNQSNSGILKDFWGDYLQYDKPYYMLNLYDPNKYVDV
NNVGIRGYMYLKGPRGSVMTTNIYLNSSLYRGTKFIIKKYASGNKDNIVRNNDRVYINVVVKRKEYRLATNASQA
GVEKILSALEIPRVRRLSQVVVMKSKNDQGITNKCKMNLQDRRGNDIGFIGFHQFNNIAKLVASNWYNRQIERRS
RRLGCSWEFIPVDDGWGERPL
SEQ ID NO: 39
(Modified BoNT/A1 (N1188R, D1213R, G1215R, N1216R, N1242R, N1243R,
S1274R, T1277R, M1144V) Polypeptide Sequence)
MPFVNKQFNYKDPVNGVDIAYIKIPNAGQMQPVKAFKIHNKIWVIPERDTFTNPEEGDLNPPPEAKQVPVSYYDS
TYLSTDNEKDNYLKGVTKLFERIYSTDLGRMLLTSIVRGIPFWGGSTIDTELKVIDTNCINVIQPDGSYRSEELN
LVIIGPSADIIQFECKSFGHEVLNLTRNGYGSTQYIRFSPDFTFGFEESLEVDTNPLLGAGKFATDPAVTLAHEL
IHAGHRLYGIAINPNRVFKVNTNAYYEMSGLEVSFEELRTFGGHDAKFIDSLQENEFRLYYYNKFKDIASTLNKA
KSIVGTTASLQYMKNVFKEKYLLSEDTSGKFSVDKLKFDKLYKMLTEIYTEDNFVKFFKVLNRKTYLNFDKAVFK
INIVPKVNYTIYDGFNLRNTNLAANFNGQNTEINNMNFTKLKNFTGLFEFYKLLCVRGIITSKTKSLDKGYNKAL
NDLCIKVNNWDLFFSPSEDNFTNDLNKGEEITSDTNIEAAEENISLDLIQQYYLTFNFDNEPENISIENLSSDII
GQLELMPNIERFPNGKKYELDKYTMFHYLRAQEFEHGKSRIALTNSVNEALLNPSRVYTFFSSDYVKKVNKATEA
AMFLGWVEQLVYDFTDETSEVSTTDKIADITIIIPYIGPALNIGNMLYKDDFVGALIFSGAVILLEFIPEIAIPV
LGTFALVSYIANKVLTVQTIDNALSKRNEKWDEVYKYIVTNWLAKVNTQIDLIRKKMKEALENQAEATKAIINYQ
YNQYTEEEKNNINFNIDDLSSKLNESINKAMININKFLNQCSVSYLMNSMIPYGVKRLEDFDASLKDALLKYIYD
NRGTLIGQVDRLKDKVNNTLSTDIPFQLSKYVDNQRLLSTFTEYIKNIINTSILNLRYESNHLIDLSRYASKINI
GSKVNFDPIDKNQIQLFNLESSKIEVILKNAIVYNSMYENFSTSFWIRIPKYFNSISLNNEYTIINCMENNSGWK
VSLNYGEIIWTLQDTQEIKQRVVFKYSQMINISDYINRWIFVTITNNRLNNSKIYINGRLIDQKPISNLGNIHAS
NNIMFKLDGCRDTHRYIWIKYFNLFDKELNEKEIKDLYDNQSNSGILKDFWGDYLQYDKPYYMLNLYDPNKYVDV
NNVGIRGYMYLKGPRGSVVTTNIYLNSSLYRGTKFIIKKYASGNKDNIVRNNDRVYINVVVKRKEYRLATNASQA
GVEKILSALEIPRVRRLSQVVVMKSKNDQGITNKCKMNLQDRRGNDIGFIGFHQENNIAKLVASNWYNRQIERRS
RRLGCSWEFIPVDDGWGERPL
SEQ ID NO: 40
(Modified BoNT/A1 (N1188R, D1213R, G1215R, N1216R, N1242R, N1243R,
S1274R, T1277R, M1144G) Polypeptide Sequence)
MPFVNKQFNYKDPVNGVDIAYIKIPNAGQMQPVKAFKIHNKIWVIPERDTFTNPEEGDLNPPPEAKQVPVSYYDS
TYLSTDNEKDNYLKGVTKLFERIYSTDLGRMLLTSIVRGIPFWGGSTIDTELKVIDTNCINVIQPDGSYRSEELN
LVIIGPSADIIQFECKSFGHEVLNLTRNGYGSTQYIRFSPDFTFGFEESLEVDTNPLLGAGKFATDPAVTLAHEL
IHAGHRLYGIAINPNRVFKVNTNAYYEMSGLEVSFEELRTFGGHDAKFIDSLQENEFRLYYYNKFKDIASTLNKA
KSIVGTTASLQYMKNVFKEKYLLSEDTSGKFSVDKLKFDKLYKMLTEIYTEDNFVKFFKVLNRKTYLNFDKAVFK
INIVPKVNYTIYDGFNLRNTNLAANFNGQNTEINNMNFTKLKNFTGLFEFYKLLCVRGIITSKTKSLDKGYNKAL
NDLCIKVNNWDLFFSPSEDNFTNDLNKGEEITSDTNIEAAEENISLDLIQQYYLTFNFDNEPENISIENLSSDII
GQLELMPNIERFPNGKKYELDKYTMFHYLRAQEFEHGKSRIALTNSVNEALLNPSRVYTFFSSDYVKKVNKATEA
AMFLGWVEQLVYDFTDETSEVSTTDKIADITIIIPYIGPALNIGNMLYKDDFVGALIFSGAVILLEFIPEIAIPV
LGTFALVSYIANKVLTVQTIDNALSKRNEKWDEVYKYIVTNWLAKVNTQIDLIRKKMKEALENQAEATKAIINYQ
YNQYTEEEKNNINFNIDDLSSKLNESINKAMININKFLNQCSVSYLMNSMIPYGVKRLEDFDASLKDALLKYIYD
NRGTLIGQVDRLKDKVNNTLSTDIPFQLSKYVDNQRLLSTFTEYIKNIINTSILNLRYESNHLIDLSRYASKINI
GSKVNFDPIDKNQIQLFNLESSKIEVILKNAIVYNSMYENFSTSFWIRIPKYFNSISLNNEYTIINCMENNSGWK
VSLNYGEIIWTLQDTQEIKQRVVFKYSQMINISDYINRWIFVTITNNRLNNSKIYINGRLIDQKPISNLGNIHAS
NNIMFKLDGCRDTHRYIWIKYFNLFDKELNEKEIKDLYDNQSNSGILKDFWGDYLQYDKPYYMLNLYDPNKYVDV
NNVGIRGYMYLKGPRGSVGTTNIYLNSSLYRGTKFIIKKYASGNKDNIVRNNDRVYINVVVKRKEYRLATNASQA
GVEKILSALEIPRVRRLSQVVVMKSKNDQGITNKCKMNLQDRRGNDIGFIGFHQFNNIAKLVASNWYNRQIERRS
RRLGCSWEFIPVDDGWGERPL
SEQ ID NO: 41
(Modified BoNT/A1 (N1188R, D1213R, G1215R, N1216R, N1242R, N1243R,
S1274R, T1277R, M1144L) Polypeptide Sequence)
MPFVNKQFNYKDPVNGVDIAYIKIPNAGQMQPVKAFKIHNKIWVIPERDTFTNPEEGDLNPPPEAKQVPVSYYDS
TYLSTDNEKDNYLKGVTKLFERIYSTDLGRMLLTSIVRGIPFWGGSTIDTELKVIDTNCINVIQPDGSYRSEELN
LVIIGPSADIIQFECKSFGHEVLNLTRNGYGSTQYIRFSPDFTFGFEESLEVDTNPLLGAGKFATDPAVTLAHEL
IHAGHRLYGIAINPNRVFKVNTNAYYEMSGLEVSFEELRTFGGHDAKFIDSLQENEFRLYYYNKFKDIASTLNKA
KSIVGTTASLQYMKNVFKEKYLLSEDTSGKFSVDKLKFDKLYKMLTEIYTEDNFVKFFKVLNRKTYLNFDKAVFK
INIVPKVNYTIYDGFNLRNTNLAANFNGQNTEINNMNFTKLKNFTGLFEFYKLLCVRGIITSKTKSLDKGYNKAL
NDLCIKVNNWDLFFSPSEDNFTNDLNKGEEITSDTNIEAAEENISLDLIQQYYLTFNFDNEPENISIENLSSDII
GQLELMPNIERFPNGKKYELDKYTMFHYLRAQEFEHGKSRIALTNSVNEALLNPSRVYTFFSSDYVKKVNKATEA
AMFLGWVEQLVYDFTDETSEVSTTDKIADITIIIPYIGPALNIGNMLYKDDFVGALIFSGAVILLEFIPEIAIPV
LGTFALVSYIANKVLTVQTIDNALSKRNEKWDEVYKYIVTNWLAKVNTQIDLIRKKMKEALENQAEATKAIINYQ
YNQYTEEEKNNINFNIDDLSSKLNESINKAMININKFLNQCSVSYLMNSMIPYGVKRLEDFDASLKDALLKYIYD
NRGTLIGQVDRLKDKVNNTLSTDIPFQLSKYVDNQRLLSTFTEYIKNIINTSILNLRYESNHLIDLSRYASKINI
GSKVNFDPIDKNQIQLFNLESSKIEVILKNAIVYNSMYENFSTSFWIRIPKYFNSISLNNEYTIINCMENNSGWK
VSLNYGEIIWTLQDTQEIKQRVVFKYSQMINISDYINRWIFVTITNNRLNNSKIYINGRLIDQKPISNLGNIHAS
NNIMFKLDGCRDTHRYIWIKYFNLFDKELNEKEIKDLYDNQSNSGILKDFWGDYLQYDKPYYMLNLYDPNKYVDV
NNVGIRGYMYLKGPRGSVLTTNIYLNSSLYRGTKFIIKKYASGNKDNIVRNNDRVYINVVVKRKEYRLATNASQA
GVEKILSALEIPRVRRLSQVVVMKSKNDQGITNKCKMNLQDRRGNDIGFIGFHQFNNIAKLVASNWYNRQIERRS
RRLGCSWEFIPVDDGWGERPL
SEQ ID NO: 42
(Modified BoNT/A1 (N1188R, D1213R, G1215R, N1216R, N1242R, N1243R,
S1274R, T1277R, M1144T) Polypeptide Sequence)
MPFVNKQFNYKDPVNGVDIAYIKIPNAGQMQPVKAFKIHNKIWVIPERDTFTNPEEGDLNPPPEAKQVPVSYYDS
TYLSTDNEKDNYLKGVTKLFERIYSTDLGRMLLTSIVRGIPFWGGSTIDTELKVIDTNCINVIQPDGSYRSEELN
LVIIGPSADIIQFECKSFGHEVLNLTRNGYGSTQYIRFSPDFTFGFEESLEVDTNPLLGAGKFATDPAVTLAHEL
IHAGHRLYGIAINPNRVFKVNTNAYYEMSGLEVSFEELRTFGGHDAKFIDSLQENEFRLYYYNKFKDIASTLNKA
KSIVGTTASLQYMKNVFKEKYLLSEDTSGKFSVDKLKFDKLYKMLTEIYTEDNFVKFFKVLNRKTYLNFDKAVFK
INIVPKVNYTIYDGFNLRNTNLAANFNGQNTEINNMNFTKLKNFTGLFEFYKLLCVRGIITSKTKSLDKGYNKAL
NDLCIKVNNWDLFFSPSEDNFTNDLNKGEEITSDTNIEAAEENISLDLIQQYYLTFNFDNEPENISIENLSSDII
GQLELMPNIERFPNGKKYELDKYTMFHYLRAQEFEHGKSRIALTNSVNEALLNPSRVYTFFSSDYVKKVNKATEA
AMFLGWVEQLVYDFTDETSEVSTTDKIADITIIIPYIGPALNIGNMLYKDDFVGALIFSGAVILLEFIPEIAIPV
LGTFALVSYIANKVLTVQTIDNALSKRNEKWDEVYKYIVTNWLAKVNTQIDLIRKKMKEALENQAEATKAIINYQ
YNQYTEEEKNNINFNIDDLSSKLNESINKAMININKFLNQCSVSYLMNSMIPYGVKRLEDFDASLKDALLKYIYD
NRGTLIGQVDRLKDKVNNTLSTDIPFQLSKYVDNQRLLSTFTEYIKNIINTSILNLRYESNHLIDLSRYASKINI
GSKVNFDPIDKNQIQLFNLESSKIEVILKNAIVYNSMYENFSTSFWIRIPKYFNSISLNNEYTIINCMENNSGWK
VSLNYGEIIWTLQDTQEIKQRVVFKYSQMINISDYINRWIFVTITNNRLNNSKIYINGRLIDQKPISNLGNIHAS
NNIMFKLDGCRDTHRYIWIKYFNLFDKELNEKEIKDLYDNQSNSGILKDFWGDYLQYDKPYYMLNLYDPNKYVDV
NNVGIRGYMYLKGPRGSVTTTNIYLNSSLYRGTKFIIKKYASGNKDNIVRNNDRVYINVVVKRKEYRLATNASQA
GVEKILSALEIPRVRRLSQVVVMKSKNDQGITNKCKMNLQDRRGNDIGFIGFHQFNNIAKLVASNWYNRQIERRS
RRLGCSWEFIPVDDGWGERPL
SEQ ID NO: 43
(Modified BoNT/A1 (N1188R, D1213R, G1215R, N1216R, N1242R, N1243R,
S1274R, T1277R, M1144A) Polypeptide Sequence)
MPFVNKQFNYKDPVNGVDIAYIKIPNAGQMQPVKAFKIHNKIWVIPERDTFTNPEEGDLNPPPEAKQVPVSYYDS
TYLSTDNEKDNYLKGVTKLFERIYSTDLGRMLLTSIVRGIPFWGGSTIDTELKVIDTNCINVIQPDGSYRSEELN
LVIIGPSADIIQFECKSFGHEVLNLTRNGYGSTQYIRFSPDFTFGFEESLEVDTNPLLGAGKFATDPAVTLAHEL
IHAGHRLYGIAINPNRVFKVNTNAYYEMSGLEVSFEELRTFGGHDAKFIDSLQENEFRLYYYNKFKDIASTLNKA
KSIVGTTASLQYMKNVFKEKYLLSEDTSGKFSVDKLKFDKLYKMLTEIYTEDNFVKFFKVLNRKTYLNFDKAVFK
INIVPKVNYTIYDGFNLRNTNLAANFNGQNTEINNMNFTKLKNFTGLFEFYKLLCVRGIITSKTKSLDKGYNKAL
NDLCIKVNNWDLFFSPSEDNFTNDLNKGEEITSDTNIEAAEENISLDLIQQYYLTENFDNEPENISIENLSSDII
GQLELMPNIERFPNGKKYELDKYTMFHYLRAQEFEHGKSRIALTNSVNEALLNPSRVYTFFSSDYVKKVNKATEA
AMFLGWVEQLVYDFTDETSEVSTTDKIADITIIIPYIGPALNIGNMLYKDDFVGALIFSGAVILLEFIPEIAIPV
LGTFALVSYIANKVLTVQTIDNALSKRNEKWDEVYKYIVTNWLAKVNTQIDLIRKKMKEALENQAEATKAIINYQ
YNQYTEEEKNNINFNIDDLSSKLNESINKAMININKFLNQCSVSYLMNSMIPYGVKRLEDFDASLKDALLKYIYD
NRGTLIGQVDRLKDKVNNTLSTDIPFQLSKYVDNQRLLSTFTEYIKNIINTSILNLRYESNHLIDLSRYASKINI
GSKVNFDPIDKNQIQLFNLESSKIEVILKNAIVYNSMYENFSTSFWIRIPKYFNSISLNNEYTIINCMENNSGWK
VSLNYGEIIWTLQDTQEIKQRVVFKYSQMINISDYINRWIFVTITNNRLNNSKIYINGRLIDQKPISNLGNIHAS
NNIMFKLDGCRDTHRYIWIKYFNLFDKELNEKEIKDLYDNQSNSGILKDFWGDYLQYDKPYYMLNLYDPNKYVDV
NNVGIRGYMYLKGPRGSVATTNIYLNSSLYRGTKFIIKKYASGNKDNIVRNNDRVYINVVVKRKEYRLATNASQA
GVEKILSALEIPRVRRLSQVVVMKSKNDQGITNKCKMNLQDRRGNDIGFIGFHQFNNIAKLVASNWYNRQIERRS
RRLGCSWEFIPVDDGWGERPL
SEQ ID NO: 44
(Modified BoNT/A1 (N1188R, D1213R, G1215R, N1216R, N1242R, N1243R,
S1274R, T1277R, M11441) Polypeptide Sequence)
MPFVNKQFNYKDPVNGVDIAYIKIPNAGQMQPVKAFKIHNKIWVIPERDTFTNPEEGDLNPPPEAKQVPVSYYDS
TYLSTDNEKDNYLKGVTKLFERIYSTDLGRMLLTSIVRGIPFWGGSTIDTELKVIDTNCINVIQPDGSYRSEELN
LVIIGPSADIIQFECKSFGHEVLNLTRNGYGSTQYIRFSPDFTFGFEESLEVDTNPLLGAGKFATDPAVTLAHEL
IHAGHRLYGIAINPNRVFKVNTNAYYEMSGLEVSFEELRTFGGHDAKFIDSLQENEFRLYYYNKFKDIASTLNKA
KSIVGTTASLQYMKNVFKEKYLLSEDTSGKFSVDKLKFDKLYKMLTEIYTEDNFVKFFKVLNRKTYLNFDKAVFK
INIVPKVNYTIYDGFNLRNTNLAANFNGQNTEINNMNFTKLKNFTGLFEFYKLLCVRGIITSKTKSLDKGYNKAL
NDLCIKVNNWDLFFSPSEDNFTNDLNKGEEITSDTNIEAAEENISLDLIQQYYLTFNFDNEPENISIENLSSDII
GQLELMPNIERFPNGKKYELDKYTMFHYLRAQEFEHGKSRIALTNSVNEALLNPSRVYTFFSSDYVKKVNKATEA
AMFLGWVEQLVYDFTDETSEVSTTDKIADITIIIPYIGPALNIGNMLYKDDFVGALIFSGAVILLEFIPEIAIPV
LGTFALVSYIANKVLTVQTIDNALSKRNEKWDEVYKYIVTNWLAKVNTQIDLIRKKMKEALENQAEATKAIINYQ
YNQYTEEEKNNINFNIDDLSSKLNESINKAMININKFLNQCSVSYLMNSMIPYGVKRLEDFDASLKDALLKYIYD
NRGTLIGQVDRLKDKVNNTLSTDIPFQLSKYVDNQRLLSTFTEYIKNIINTSILNLRYESNHLIDLSRYASKINI
GSKVNFDPIDKNQIQLFNLESSKIEVILKNAIVYNSMYENFSTSFWIRIPKYFNSISLNNEYTIINCMENNSGWK
VSLNYGEIIWTLQDTQEIKQRVVFKYSQMINISDYINRWIFVTITNNRLNNSKIYINGRLIDQKPISNLGNIHAS
NNIMFKLDGCRDTHRYIWIKYFNLFDKELNEKEIKDLYDNQSNSGILKDFWGDYLQYDKPYYMLNLYDPNKYVDV
NNVGIRGYMYLKGPRGSVITTNIYLNSSLYRGTKFIIKKYASGNKDNIVRNNDRVYINVVVKRKEYRLATNASQA
GVEKILSALEIPRVRRLSQVVVMKSKNDQGITNKCKMNLQDRRGNDIGFIGFHQFNNIAKLVASNWYNRQIERRS
RRLGCSWEFIPVDDGWGERPL
SEQ ID NO: 45
(Modified BoNT/A1 (N1188R, D1213R, G1215R, N1216R, N1242R, N1243R,
S1274R, T1277R, M1144 Deletion) Polypeptide Sequence)
MPFVNKQFNYKDPVNGVDIAYIKIPNAGQMQPVKAFKIHNKIWVIPERDTFTNPEEGDLNPPPEAKQVPVSYYDS
TYLSTDNEKDNYLKGVTKLFERIYSTDLGRMLLTSIVRGIPFWGGSTIDTELKVIDTNCINVIQPDGSYRSEELN
LVIIGPSADIIQFECKSFGHEVLNLTRNGYGSTQYIRFSPDFTFGFEESLEVDTNPLLGAGKFATDPAVTLAHEL
IHAGHRLYGIAINPNRVFKVNTNAYYEMSGLEVSFEELRTFGGHDAKFIDSLQENEFRLYYYNKFKDIASTINKA
KSIVGTTASLQYMKNVFKEKYLLSEDTSGKFSVDKLKFDKLYKMLTEIYTEDNFVKFFKVLNRKTYLNFDKAVFK
INIVPKVNYTIYDGFNLRNTNLAANFNGQNTEINNMNFTKLKNFTGLFEFYKLLCVRGIITSKTKSLDKGYNKAL
NDLCIKVNNWDLFFSPSEDNFTNDLNKGEEITSDTNIEAAEENISLDLIQQYYLTFNFDNEPENISIENLSSDII
GQLELMPNIERFPNGKKYELDKYTMFHYLRAQEFEHGKSRIALTNSVNEALLNPSRVYTFFSSDYVKKVNKATEA
AMFLGWVEQLVYDFTDETSEVSTTDKIADITIIIPYIGPALNIGNMLYKDDFVGALIFSGAVILLEFIPEIAIPV
LGTFALVSYIANKVLTVQTIDNALSKRNEKWDEVYKYIVTNWLAKVNTQIDLIRKKMKEALENQAEATKAIINYQ
YNQYTEEEKNNINFNIDDLSSKLNESINKAMININKFLNQCSVSYLMNSMIPYGVKRLEDFDASLKDALLKYIYD
NRGTLIGQVDRLKDKVNNTLSTDIPFQLSKYVDNQRLLSTFTEYIKNIINTSILNLRYESNHLIDLSRYASKINI
GSKVNFDPIDKNQIQLFNLESSKIEVILKNAIVYNSMYENFSTSFWIRIPKYFNSISLNNEYTIINCMENNSGWK
VSLNYGEIIWTLQDTQEIKQRVVFKYSQMINISDYINRWIFVTITNNRLNNSKIYINGRLIDQKPISNLGNIHAS
NNIMFKLDGCRDTHRYIWIKYFNLFDKELNEKEIKDLYDNQSNSGILKDFWGDYLQYDKPYYMLNLYDPNKYVDV
NNVGIRGYMYLKGPRGSVTTNIYLNSSLYRGTKFIIKKYASGNKDNIVRNNDRVYINVVVKRKEYRLATNASQAG
VEKILSALEIPRVRRLSQVVVMKSKNDQGITNKCKMNLQDRRGNDIGFIGFHQFNNIAKLVASNWYNRQIERRSR
RLGCSWEFIPVDDGWGERPL
SEQ ID NO: 46
(BoNT/A3 Polypeptide Sequence)
MPFVNKPFNYRDPGNGVDIAYIKIPNAGQMQPVKAFKIHEGVWVIPERDTFTNPEEGDLN
PPPEAKQVPVSYYDSTYLSTDNEKDNYLKGVIKLFDRIYSTGLGRMLLSFIVKGIPFWGG
STIDTELKVIDTNCINVIEPGGSYRSEELNLVITGPSADIIQFECKSFGHDVFNLTRNGY
GSTQYIRFSPDFTFGFEESLEVDTNPLLGAGTFATDPAVTLAHELIHAAHRLYGIAINPN
RVLKVKTNAYYEMSGLEVSFEELRTFGGNDTNFIDSLWQKKFSRDAYDNLQNIARILNEA
KTIVGTTTPLQYMKNIFIRKYFLSEDASGKISVNKAAFKEFYRVLTRGFTELEFVNPFKV
INRKTYLNFDKAVFRINIVPDENYTINEGFNLEGANSNGQNTEINSRNFTRLKNFTGLFE
FYKLLCVRGIIPFKTKSLDEGYNKALNYLCIKVNNWDLFFSPSEDNFTNDLDKVEEITAD
TNIEAAEENISSDLIQQYYLTFDFDNEPENISIENLSSDIIGQLEPMPNIERFPNGKKYE
LDKYTMFHYLRAQEFEHGDSRIILTNSAEEALLKPNVAYTFFSSKYVKKINKAVEAVIFL
SWAEELVYDFTDETNEVTTMDKIADITIIVPYIGPALNIGNMVSKGEFVEAILFTGVVAL
LEFIPEYSLPVFGTFAIVSYIANKVLTVQTINNALSKRNEKWDEVYKYTVTNWLAKVNTQ
IDLIREKMKKALENQAEATRAIINYQYNQYTEEEKNNINFNIDDLSSKLNRSINRAMINI
NKFLDQCSVSYLMNSMIPYAVKRLKDFDASVRDVLLKYIYDNRGTLILQVDRLKDEVNNT
LSADIPFQLSKYVNDKKLLSTFTEYIKNIVNTSILSIVYKKDDLIDLSRYGAKINIGDRV
YYDSIDKNQIKLINLESSTIEVILKNAIVYNSMYENFSTSFWIKIPKYFSKINLNNEYTI
INCIENNSGWKVSLNYGEIIWTLQDNKQNIQRVVFKYSQMVNISDYINRWMFVTITNNRL
TKSKIYINGRLIDQKPISNLGNIHASNKIMFKLDGCRDPRRYIMIKYFNLFDKELNEKEI
KDLYDSQSNPGILKDFWGNYLQYDKPYYMLNLFDPNKYVDVNNIGIRGYMYLKGPRGSVM
TTNIYLNSTLYMGTKFIIKKYASGNEDNIVRNNDRVYINVVVKNKEYRLATNASQAGVEK
ILSALEIPDVGNLSQVVVMKSKDDQGIRNKCKMNLQDNNGNDIGFVGFHLYDNIAKLVAS
NWYNRQVGKASRTFGCSWEFIPVDDGWGESSL
SEQ ID NO: 47
(Modified BoNT/A3 (M1140V) Polypeptide Sequence)
MPFVNKPFNYRDPGNGVDIAYIKIPNAGQMQPVKAFKIHEGVWVIPERDTFTNPEEGDLN
PPPEAKQVPVSYYDSTYLSTDNEKDNYLKGVIKLFDRIYSTGLGRMLLSFIVKGIPFWGG
STIDTELKVIDTNCINVIEPGGSYRSEELNLVITGPSADIIQFECKSFGHDVFNLTRNGY
GSTQYIRFSPDFTFGFEESLEVDTNPLLGAGTFATDPAVTLAHELIHAAHRLYGIAINPN
RVLKVKTNAYYEMSGLEVSFEELRTFGGNDTNFIDSLWQKKFSRDAYDNLQNIARILNEA
KTIVGTTTPLQYMKNIFIRKYFLSEDASGKISVNKAAFKEFYRVLTRGFTELEFVNPFKV
INRKTYLNFDKAVFRINIVPDENYTINEGFNLEGANSNGQNTEINSRNFTRLKNFTGLFE
FYKLLCVRGIIPFKTKSLDEGYNKALNYLCIKVNNWDLFFSPSEDNFTNDLDKVEEITAD
TNIEAAEENISSDLIQQYYLTFDFDNEPENISIENLSSDIIGQLEPMPNIERFPNGKKYE
LDKYTMFHYLRAQEFEHGDSRIILTNSAEEALLKPNVAYTFFSSKYVKKINKAVEAVIFL
SWAEELVYDFTDETNEVTTMDKIADITIIVPYIGPALNIGNMVSKGEFVEAILFTGVVAL
LEFIPEYSLPVFGTFAIVSYIANKVLTVQTINNALSKRNEKWDEVYKYTVTNWLAKVNTQ
IDLIREKMKKALENQAEATRAIINYQYNQYTEEEKNNINFNIDDLSSKLNRSINRAMINI
NKFLDQCSVSYLMNSMIPYAVKRLKDFDASVRDVLLKYIYDNRGTLILQVDRLKDEVNNT
LSADIPFQLSKYVNDKKLLSTFTEYIKNIVNTSILSIVYKKDDLIDLSRYGAKINIGDRV
YYDSIDKNQIKLINLESSTIEVILKNAIVYNSMYENFSTSFWIKIPKYFSKINLNNEYTI
INCIENNSGWKVSLNYGEIIWTLQDNKQNIQRVVFKYSQMVNISDYINRWMFVTITNNRL
TKSKIYINGRLIDQKPISNLGNIHASNKIMFKLDGCRDPRRYIMIKYFNLFDKELNEKEI
KDLYDSQSNPGILKDFWGNYLQYDKPYYMLNLFDPNKYVDVNNIGIRGYMYLKGPRGSVV
TTNIYLNSTLYMGTKFIIKKYASGNEDNIVRNNDRVYINVVVKNKEYRLATNASQAGVEK
ILSALEIPDVGNLSQVVVMKSKDDQGIRNKCKMNLQDNNGNDIGFVGFHLYDNIAKLVAS
NWYNRQVGKASRTFGCSWEFIPVDDGWGESSL
SEQ ID NO: 48
(Modified BoNT/A3 (M1140G) Polypeptide Sequence)
MPFVNKPFNYRDPGNGVDIAYIKIPNAGQMQPVKAFKIHEGVWVIPERDTFTNPEEGDLN
PPPEAKQVPVSYYDSTYLSTDNEKDNYLKGVIKLFDRIYSTGLGRMLLSFIVKGIPFWGG
STIDTELKVIDTNCINVIEPGGSYRSEELNLVITGPSADIIQFECKSFGHDVFNLTRNGY
GSTQYIRFSPDFTFGFEESLEVDTNPLLGAGTFATDPAVTLAHELIHAAHRLYGIAINPN
RVLKVKTNAYYEMSGLEVSFEELRTFGGNDTNFIDSLWQKKFSRDAYDNLQNIARILNEA
KTIVGTTTPLQYMKNIFIRKYFLSEDASGKISVNKAAFKEFYRVLTRGFTELEFVNPFKV
INRKTYLNFDKAVFRINIVPDENYTINEGFNLEGANSNGQNTEINSRNFTRLKNFTGLFE
FYKLLCVRGIIPFKTKSLDEGYNKALNYLCIKVNNWDLFFSPSEDNFTNDLDKVEEITAD
TNIEAAEENISSDLIQQYYLTFDFDNEPENISIENLSSDIIGQLEPMPNIERFPNGKKYE
LDKYTMFHYLRAQEFEHGDSRIILTNSAEEALLKPNVAYTFFSSKYVKKINKAVEAVIFL
SWAEELVYDFTDETNEVTTMDKIADITIIVPYIGPALNIGNMVSKGEFVEAILFTGVVAL
LEFIPEYSLPVFGTFAIVSYIANKVLTVQTINNALSKRNEKWDEVYKYTVTNWLAKVNTQ
IDLIREKMKKALENQAEATRAIINYQYNQYTEEEKNNINFNIDDLSSKLNRSINRAMINI
NKFLDQCSVSYLMNSMIPYAVKRLKDFDASVRDVLLKYIYDNRGTLILQVDRLKDEVNNT
LSADIPFQLSKYVNDKKLLSTFTEYIKNIVNTSILSIVYKKDDLIDLSRYGAKINIGDRV
YYDSIDKNQIKLINLESSTIEVILKNAIVYNSMYENFSTSFWIKIPKYFSKINLNNEYTI
INCIENNSGWKVSLNYGEIIWTLQDNKQNIQRVVFKYSQMVNISDYINRWMFVTITNNRL
TKSKIYINGRLIDQKPISNLGNIHASNKIMFKLDGCRDPRRYIMIKYFNLFDKELNEKEI
KDLYDSQSNPGILKDFWGNYLQYDKPYYMLNLFDPNKYVDVNNIGIRGYMYLKGPRGSVG
TTNIYLNSTLYMGTKFIIKKYASGNEDNIVRNNDRVYINVVVKNKEYRLATNASQAGVEK
ILSALEIPDVGNLSQVVVMKSKDDQGIRNKCKMNLQDNNGNDIGFVGFHLYDNIAKLVAS
NWYNRQVGKASRTFGCSWEFIPVDDGWGESSL
SEQ ID NO: 49
(Modified BoNT/A3 (M1140L) Polypeptide Sequence)
MPFVNKPFNYRDPGNGVDIAYIKIPNAGQMQPVKAFKIHEGVWVIPERDTFTNPEEGDLN
PPPEAKQVPVSYYDSTYLSTDNEKDNYLKGVIKLFDRIYSTGLGRMLLSFIVKGIPFWGG
STIDTELKVIDTNCINVIEPGGSYRSEELNLVITGPSADIIQFECKSFGHDVFNLTRNGY
GSTQYIRFSPDFTFGFEESLEVDTNPLLGAGTFATDPAVTLAHELIHAAHRLYGIAINPN
RVLKVKTNAYYEMSGLEVSFEELRTFGGNDTNFIDSLWQKKFSRDAYDNLQNIARILNEA
KTIVGTTTPLQYMKNIFIRKYFLSEDASGKISVNKAAFKEFYRVLTRGFTELEFVNPFKV
INRKTYLNFDKAVFRINIVPDENYTINEGFNLEGANSNGQNTEINSRNFTRLKNFTGLFE
FYKLLCVRGIIPFKTKSLDEGYNKALNYLCIKVNNWDLFFSPSEDNFTNDLDKVEEITAD
TNIEAAEENISSDLIQQYYLTFDFDNEPENISIENLSSDIIGQLEPMPNIERFPNGKKYE
LDKYTMFHYLRAQEFEHGDSRIILTNSAEEALLKPNVAYTFFSSKYVKKINKAVEAVIFL
SWAEELVYDFTDETNEVTTMDKIADITIIVPYIGPALNIGNMVSKGEFVEAILFTGVVAL
LEFIPEYSLPVFGTFAIVSYIANKVLTVQTINNALSKRNEKWDEVYKYTVTNWLAKVNTQ
IDLIREKMKKALENQAEATRAIINYQYNQYTEEEKNNINFNIDDLSSKLNRSINRAMINI
NKFLDQCSVSYLMNSMIPYAVKRLKDFDASVRDVLLKYIYDNRGTLILQVDRLKDEVNNT
LSADIPFQLSKYVNDKKLLSTFTEYIKNIVNTSILSIVYKKDDLIDLSRYGAKINIGDRV
YYDSIDKNQIKLINLESSTIEVILKNAIVYNSMYENFSTSFWIKIPKYFSKINLNNEYTI
INCIENNSGWKVSLNYGEIIWTLQDNKQNIQRVVFKYSQMVNISDYINRWMFVTITNNRL
TKSKIYINGRLIDQKPISNLGNIHASNKIMFKLDGCRDPRRYIMIKYFNLFDKELNEKEI
KDLYDSQSNPGILKDFWGNYLQYDKPYYMLNLFDPNKYVDVNNIGIRGYMYLKGPRGSVL
TTNIYLNSTLYMGTKFIIKKYASGNEDNIVRNNDRVYINVVVKNKEYRLATNASQAGVEK
ILSALEIPDVGNLSQVVVMKSKDDQGIRNKCKMNLQDNNGNDIGFVGFHLYDNIAKLVAS
NWYNRQVGKASRTFGCSWEFIPVDDGWGESSL
SEQ ID NO: 50
(Modified BoNT/A3 (M1140T) Polypeptide Sequence)
MPFVNKPFNYRDPGNGVDIAYIKIPNAGQMQPVKAFKIHEGVWVIPERDTFTNPEEGDLN
PPPEAKQVPVSYYDSTYLSTDNEKDNYLKGVIKLFDRIYSTGLGRMLLSFIVKGIPFWGG
STIDTELKVIDTNCINVIEPGGSYRSEELNLVITGPSADIIQFECKSFGHDVFNLTRNGY
GSTQYIRFSPDFTFGFEESLEVDTNPLLGAGTFATDPAVTLAHELIHAAHRLYGIAINPN
RVLKVKTNAYYEMSGLEVSFEELRTFGGNDTNFIDSLWQKKFSRDAYDNLQNIARILNEA
KTIVGTTTPLQYMKNIFIRKYFLSEDASGKISVNKAAFKEFYRVLTRGFTELEFVNPFKV
INRKTYLNFDKAVFRINIVPDENYTINEGFNLEGANSNGQNTEINSRNFTRLKNFTGLFE
FYKLLCVRGIIPFKTKSLDEGYNKALNYLCIKVNNWDLFFSPSEDNFTNDLDKVEEITAD
TNIEAAEENISSDLIQQYYLTFDFDNEPENISIENLSSDIIGQLEPMPNIERFPNGKKYE
LDKYTMFHYLRAQEFEHGDSRIILTNSAEEALLKPNVAYTFFSSKYVKKINKAVEAVIFL
SWAEELVYDFTDETNEVTTMDKIADITIIVPYIGPALNIGNMVSKGEFVEAILFTGVVAL
LEFIPEYSLPVFGTFAIVSYIANKVLTVQTINNALSKRNEKWDEVYKYTVTNWLAKVNTQ
IDLIREKMKKALENQAEATRAIINYQYNQYTEEEKNNINFNIDDLSSKLNRSINRAMINI
NKFLDQCSVSYLMNSMIPYAVKRLKDFDASVRDVLLKYIYDNRGTLILQVDRLKDEVNNT
LSADIPFQLSKYVNDKKLLSTFTEYIKNIVNTSILSIVYKKDDLIDLSRYGAKINIGDRV
YYDSIDKNQIKLINLESSTIEVILKNAIVYNSMYENFSTSFWIKIPKYFSKINLNNEYTI
INCIENNSGWKVSLNYGEIIWTLQDNKQNIQRVVFKYSQMVNISDYINRWMFVTITNNRL
TKSKIYINGRLIDQKPISNLGNIHASNKIMFKLDGCRDPRRYIMIKYFNLFDKELNEKEI
KDLYDSQSNPGILKDFWGNYLQYDKPYYMLNLFDPNKYVDVNNIGIRGYMYLKGPRGSVT
TTNIYLNSTLYMGTKFIIKKYASGNEDNIVRNNDRVYINVVVKNKEYRLATNASQAGVEK
ILSALEIPDVGNLSQVVVMKSKDDQGIRNKCKMNLQDNNGNDIGFVGFHLYDNIAKLVAS
NWYNRQVGKASRTFGCSWEFIPVDDGWGESSL
SEQ ID NO: 51
(Modified BoNT/A3 (M1140A) Polypeptide Sequence)
MPFVNKPFNYRDPGNGVDIAYIKIPNAGQMQPVKAFKIHEGVWVIPERDTFTNPEEGDLN
PPPEAKQVPVSYYDSTYLSTDNEKDNYLKGVIKLFDRIYSTGLGRMLLSFIVKGIPFWGG
STIDTELKVIDTNCINVIEPGGSYRSEELNLVITGPSADIIQFECKSFGHDVFNLTRNGY
GSTQYIRFSPDFTFGFEESLEVDTNPLLGAGTFATDPAVTLAHELIHAAHRLYGIAINPN
RVLKVKTNAYYEMSGLEVSFEELRTFGGNDTNFIDSLWQKKFSRDAYDNLQNIARILNEA
KTIVGTTTPLQYMKNIFIRKYFLSEDASGKISVNKAAFKEFYRVLTRGFTELEFVNPFKV
INRKTYLNFDKAVFRINIVPDENYTINEGFNLEGANSNGQNTEINSRNFTRLKNFTGLFE
FYKLLCVRGIIPFKTKSLDEGYNKALNYLCIKVNNWDLFFSPSEDNFTNDLDKVEEITAD
TNIEAAEENISSDLIQQYYLTFDFDNEPENISIENLSSDIIGQLEPMPNIERFPNGKKYE
LDKYTMFHYLRAQEFEHGDSRIILTNSAEEALLKPNVAYTFFSSKYVKKINKAVEAVIFL
SWAEELVYDFTDETNEVTTMDKIADITIIVPYIGPALNIGNMVSKGEFVEAILFTGVVAL
LEFIPEYSLPVFGTFAIVSYIANKVLTVQTINNALSKRNEKWDEVYKYTVTNWLAKVNTQ
IDLIREKMKKALENQAEATRAIINYQYNQYTEEEKNNINFNIDDLSSKLNRSINRAMINI
NKFLDQCSVSYLMNSMIPYAVKRLKDFDASVRDVLLKYIYDNRGTLILQVDRLKDEVNNT
LSADIPFQLSKYVNDKKLLSTFTEYIKNIVNTSILSIVYKKDDLIDLSRYGAKINIGDRV
YYDSIDKNQIKLINLESSTIEVILKNAIVYNSMYENFSTSFWIKIPKYFSKINLNNEYTI
INCIENNSGWKVSLNYGEIIWTLQDNKQNIQRVVFKYSQMVNISDYINRWMFVTITNNRL
TKSKIYINGRLIDQKPISNLGNIHASNKIMFKLDGCRDPRRYIMIKYFNLFDKELNEKEI
KDLYDSQSNPGILKDFWGNYLQYDKPYYMLNLFDPNKYVDVNNIGIRGYMYLKGPRGSVA
TTNIYLNSTLYMGTKFIIKKYASGNEDNIVRNNDRVYINVVVKNKEYRLATNASQAGVEK
ILSALEIPDVGNLSQVVVMKSKDDQGIRNKCKMNLQDNNGNDIGFVGFHLYDNIAKLVAS
NWYNRQVGKASRTFGCSWEFIPVDDGWGESSL
SEQ ID NO: 52
(Modified BoNT/A3 (M11401) Polypeptide Sequence)
MPFVNKPFNYRDPGNGVDIAYIKIPNAGQMQPVKAFKIHEGVWVIPERDTFTNPEEGDLN
PPPEAKQVPVSYYDSTYLSTDNEKDNYLKGVIKLFDRIYSTGLGRMLLSFIVKGIPFWGG
STIDTELKVIDTNCINVIEPGGSYRSEELNLVITGPSADIIQFECKSFGHDVFNLTRNGY
GSTQYIRFSPDFTFGFEESLEVDTNPLLGAGTFATDPAVTLAHELIHAAHRLYGIAINPN
RVLKVKTNAYYEMSGLEVSFEELRTFGGNDTNFIDSLWQKKFSRDAYDNLQNIARILNEA
KTIVGTTTPLQYMKNIFIRKYFLSEDASGKISVNKAAFKEFYRVLTRGFTELEFVNPFKV
INRKTYLNFDKAVFRINIVPDENYTINEGFNLEGANSNGQNTEINSRNFTRLKNFTGLFE
FYKLLCVRGIIPFKTKSLDEGYNKALNYLCIKVNNWDLFFSPSEDNFTNDLDKVEEITAD
TNIEAAEENISSDLIQQYYLTFDFDNEPENISIENLSSDIIGQLEPMPNIERFPNGKKYE
LDKYTMFHYLRAQEFEHGDSRIILTNSAEEALLKPNVAYTFFSSKYVKKINKAVEAVIFL
SWAEELVYDFTDETNEVTTMDKIADITIIVPYIGPALNIGNMVSKGEFVEAILFTGVVAL
LEFIPEYSLPVFGTFAIVSYIANKVLTVQTINNALSKRNEKWDEVYKYTVTNWLAKVNTQ
IDLIREKMKKALENQAEATRAIINYQYNQYTEEEKNNINFNIDDLSSKLNRSINRAMINI
NKFLDQCSVSYLMNSMIPYAVKRLKDFDASVRDVLLKYIYDNRGTLILQVDRLKDEVNNT
LSADIPFQLSKYVNDKKLLSTFTEYIKNIVNTSILSIVYKKDDLIDLSRYGAKINIGDRV
YYDSIDKNQIKLINLESSTIEVILKNAIVYNSMYENFSTSFWIKIPKYFSKINLNNEYTI
INCIENNSGWKVSLNYGEIIWTLQDNKQNIQRVVFKYSQMVNISDYINRWMFVTITNNRL
TKSKIYINGRLIDQKPISNLGNIHASNKIMFKLDGCRDPRRYIMIKYFNLFDKELNEKEI
KDLYDSQSNPGILKDFWGNYLQYDKPYYMLNLFDPNKYVDVNNIGIRGYMYLKGPRGSVI
TTNIYLNSTLYMGTKFIIKKYASGNEDNIVRNNDRVYINVVVKNKEYRLATNASQAGVEK
ILSALEIPDVGNLSQVVVMKSKDDQGIRNKCKMNLQDNNGNDIGFVGFHLYDNIAKLVAS
NWYNRQVGKASRTFGCSWEFIPVDDGWGESSL
SEQ ID NO: 53
(Modified BoNT/A3 (M1140 Deletion) Polypeptide Sequence)
MPFVNKPFNYRDPGNGVDIAYIKIPNAGQMQPVKAFKIHEGVWVIPERDTFTNPEEGDLN
PPPEAKQVPVSYYDSTYLSTDNEKDNYLKGVIKLFDRIYSTGLGRMLLSFIVKGIPFWGG
STIDTELKVIDTNCINVIEPGGSYRSEELNLVITGPSADIIQFECKSFGHDVFNLTRNGY
GSTQYIRFSPDFTFGFEESLEVDTNPLLGAGTFATDPAVTLAHELIHAAHRLYGIAINPN
RVLKVKTNAYYEMSGLEVSFEELRTFGGNDTNFIDSLWQKKFSRDAYDNLQNIARILNEA
KTIVGTTTPLQYMKNIFIRKYFLSEDASGKISVNKAAFKEFYRVLTRGFTELEFVNPFKV
INRKTYLNFDKAVFRINIVPDENYTINEGFNLEGANSNGQNTEINSRNFTRLKNFTGLFE
FYKLLCVRGIIPFKTKSLDEGYNKALNYLCIKVNNWDLFFSPSEDNFTNDLDKVEEITAD
TNIEAAEENISSDLIQQYYLTFDFDNEPENISIENLSSDIIGQLEPMPNIERFPNGKKYE
LDKYTMFHYLRAQEFEHGDSRIILTNSAEEALLKPNVAYTFFSSKYVKKINKAVEAVIFL
SWAEELVYDFTDETNEVTTMDKIADITIIVPYIGPALNIGNMVSKGEFVEAILFTGVVAL
LEFIPEYSLPVFGTFAIVSYIANKVLTVQTINNALSKRNEKWDEVYKYTVTNWLAKVNTQ
IDLIREKMKKALENQAEATRAIINYQYNQYTEEEKNNINFNIDDLSSKLNRSINRAMINI
NKFLDQCSVSYLMNSMIPYAVKRLKDFDASVRDVLLKYIYDNRGTLILQVDRLKDEVNNT
LSADIPFQLSKYVNDKKLLSTFTEYIKNIVNTSILSIVYKKDDLIDLSRYGAKINIGDRV
YYDSIDKNQIKLINLESSTIEVILKNAIVYNSMYENFSTSFWIKIPKYFSKINLNNEYTI
INCIENNSGWKVSLNYGEIIWTLQDNKQNIQRVVFKYSQMVNISDYINRWMFVTITNNRL
TKSKIYINGRLIDQKPISNLGNIHASNKIMFKLDGCRDPRRYIMIKYFNLFDKELNEKEI
KDLYDSQSNPGILKDFWGNYLQYDKPYYMLNLFDPNKYVDVNNIGIRGYMYLKGPRGSV
TTNIYLNSTLYMGTKFIIKKYASGNEDNIVRNNDRVYINVVVKNKEYRLATNASQAGVEK
ILSALEIPDVGNLSQVVVMKSKDDQGIRNKCKMNLQDNNGNDIGFVGFHLYDNIAKLVAS
NWYNRQVGKASRTFGCSWEFIPVDDGWGESSL
SEQ ID NO: 54
(BoNT/A4 Polypeptide Sequence)
MPLVNQQINYYDPVNGVDIAYIKIPNAGKMQPVKAFKIHNKVWVIPERDIFTNPEEVDLN
PPPEAKQVPISYYDSAYLSTDNEKDNYLKGVIKLFERIYSTDLGRMLLISIVRGIPFWGG
GKIDTELKVIDTNCINIIQLDDSYRSEELNLAIIGPSANIIESQCSSFRDDVLNLTRNGY
GSTQYIRFSPDFTVGFEESLEVDTNPLLGAGKFAQDPAVALAHELIHAEHRLYGIAINTN
RVFKVNTNAYYEMAGLEVSLEELITFGGNDAKFIDSLQKKEFSLYYYNKFKDIASTLNKA
KSIVGTTASLQYMKNVFKEKYLLSEDATGKFLVDRLKFDELYKLLTEIYTEDNFVKFFKV
LNRKTYLNFDKAVFKINIVPDVNYTIHDGFNLRNTNLAANENGQNIEINNKNFDKLKNFT
GLFEFYKLLCVRGIITSKTKSLDEGYNKALNELCIKVNNWDLFFSPSEDNFTNDLDKVEE
ITSDTNIEAAEENISLDLIQQYYLNFNFDNEPENTSIENLSSDIIGQLEPMPNIERFPNG
KKYELNKYTMFHYLRAQEFKHSNSRIILTNSAKEALLKPNIVYTFFSSKYIKAINKAVEA
VTFVNWIENLVYDFTDETNEVSTMDKIADITIVIPYIGPALNIGNMIYKGEFVEAIIFSG
AVILLEIVPEIALPVLGTFALVSYVSNKVLTVQTIDNALSKRNEKWDEVYKYIVTNWLAI
VNTQINLIREKMKKALENQAEATKAIINYQYNQYTEEEKNNINFNIDDLSSKLNESINSA
MININKFLDQCSVSYLMNSMIPYAVKRLKDFDASVRDVLLKYIYDNRGTLIGQVNRLKDK
VNNTLSADIPFQLSKYVDNKKLLSTFTEYIKNITNASILSIVYKDDDLIDLSRYGAEIYN
GDKVYYNSIDKNQIRLINLESSTIEVILKKAIVYNSMYENFSTSFWIRIPKYFNSISLNN
EYTIINCMENNSGWKVSLNYGEIIWTFQDTQEIKQRVVFKYSQMINISDYINRWIFVTIT
NNRITKSKIYINGRLIDQKPISNLGNIHASNKIMFKLDGCRDPHRYIVIKYFNLFDKELS
EKEIKDLYDNQSNSGILKDFWGDYLQYDKSYYMLNLYDPNKYVDVNNVGIRGYMYLKGPR
DNVMTTNIYLNSSLYMGTKFIIKKYASGNKDNIVRNNDRVYINVVVKNKEYRLATNASQA
GVEKILSALEIPDVGNLSQVVVMKSKNDQGITNKCKMNLQDNNGNDIGFIGFHQFNNIAK
LVASNWYNRQIERSSRTLGCSWEFIPVDDGWRERPL
SEQ ID NO: 55
(Modified BoNT/A4 (M1144V) Polypeptide Sequence)
MPLVNQQINYYDPVNGVDIAYIKIPNAGKMQPVKAFKIHNKVWVIPERDIFTNPEEVDLN
PPPEAKQVPISYYDSAYLSTDNEKDNYLKGVIKLFERIYSTDLGRMLLISIVRGIPFWGG
GKIDTELKVIDTNCINIIQLDDSYRSEELNLAIIGPSANIIESQCSSFRDDVLNLTRNGY
GSTQYIRFSPDFTVGFEESLEVDTNPLLGAGKFAQDPAVALAHELIHAEHRLYGIAINTN
RVFKVNTNAYYEMAGLEVSLEELITFGGNDAKFIDSLQKKEFSLYYYNKFKDIASTLNKA
KSIVGTTASLQYMKNVFKEKYLLSEDATGKFLVDRLKFDELYKLLTEIYTEDNFVKFFKV
LNRKTYLNFDKAVFKINIVPDVNYTIHDGFNLRNTNLAANFNGQNIEINNKNFDKLKNFT
GLFEFYKLLCVRGIITSKTKSLDEGYNKALNELCIKVNNWDLFFSPSEDNFTNDLDKVEE
ITSDTNIEAAEENISLDLIQQYYLNFNFDNEPENTSIENLSSDIIGQLEPMPNIERFPNG
KKYELNKYTMFHYLRAQEFKHSNSRIILTNSAKEALLKPNIVYTFFSSKYIKAINKAVEA
VTFVNWIENLVYDFTDETNEVSTMDKIADITIVIPYIGPALNIGNMIYKGEFVEAIIFSG
AVILLEIVPEIALPVLGTFALVSYVSNKVLTVQTIDNALSKRNEKWDEVYKYIVTNWLAI
VNTQINLIREKMKKALENQAEATKAIINYQYNQYTEEEKNNINFNIDDLSSKLNESINSA
MININKFLDQCSVSYLMNSMIPYAVKRLKDFDASVRDVLLKYIYDNRGTLIGQVNRLKDK
VNNTLSADIPFQLSKYVDNKKLLSTFTEYIKNITNASILSIVYKDDDLIDLSRYGAEIYN
GDKVYYNSIDKNQIRLINLESSTIEVILKKAIVYNSMYENFSTSFWIRIPKYFNSISLNN
EYTIINCMENNSGWKVSLNYGEIIWTFQDTQEIKQRVVFKYSQMINISDYINRWIFVTIT
NNRITKSKIYINGRLIDQKPISNLGNIHASNKIMFKLDGCRDPHRYIVIKYENLEDKELS
EKEIKDLYDNQSNSGILKDFWGDYLQYDKSYYMLNLYDPNKYVDVNNVGIRGYMYLKGPR
DNVVTTNIYLNSSLYMGTKFIIKKYASGNKDNIVRNNDRVYINVVVKNKEYRLATNASQA
GVEKILSALEIPDVGNLSQVVVMKSKNDQGITNKCKMNLQDNNGNDIGFIGFHQFNNIAK
LVASNWYNRQIERSSRTLGCSWEFIPVDDGWRERPL
SEQ ID NO: 56
(Modified BoNT/A4 (M1144G) Polypeptide Sequence)
MPLVNQQINYYDPVNGVDIAYIKIPNAGKMQPVKAFKIHNKVWVIPERDIFTNPEEVDLN
PPPEAKQVPISYYDSAYLSTDNEKDNYLKGVIKLFERIYSTDLGRMLLISIVRGIPFWGG
GKIDTELKVIDTNCINIIQLDDSYRSEELNLAIIGPSANIIESQCSSERDDVLNLTRNGY
GSTQYIRFSPDFTVGFEESLEVDTNPLLGAGKFAQDPAVALAHELIHAEHRLYGIAINTN
RVFKVNTNAYYEMAGLEVSLEELITFGGNDAKFIDSLQKKEFSLYYYNKFKDIASTLNKA
KSIVGTTASLQYMKNVFKEKYLLSEDATGKFLVDRLKFDELYKLLTEIYTEDNFVKFFKV
LNRKTYLNFDKAVFKINIVPDVNYTIHDGFNLRNTNLAANFNGQNIEINNKNFDKLKNFT
GLFEFYKLLCVRGIITSKTKSLDEGYNKALNELCIKVNNWDLFFSPSEDNFTNDLDKVEE
ITSDTNIEAAEENISLDLIQQYYLNFNFDNEPENTSIENLSSDIIGQLEPMPNIERFPNG
KKYELNKYTMFHYLRAQEFKHSNSRIILTNSAKEALLKPNIVYTFFSSKYIKAINKAVEA
VTFVNWIENLVYDFTDETNEVSTMDKIADITIVIPYIGPALNIGNMIYKGEFVEAIIFSG
AVILLEIVPEIALPVLGTFALVSYVSNKVLTVQTIDNALSKRNEKWDEVYKYIVTNWLAI
VNTQINLIREKMKKALENQAEATKAIINYQYNQYTEEEKNNINFNIDDLSSKLNESINSA
MININKFLDQCSVSYLMNSMIPYAVKRLKDFDASVRDVLLKYIYDNRGTLIGQVNRLKDK
VNNTLSADIPFQLSKYVDNKKLLSTFTEYIKNITNASILSIVYKDDDLIDLSRYGAEIYN
GDKVYYNSIDKNQIRLINLESSTIEVILKKAIVYNSMYENFSTSFWIRIPKYFNSISLNN
EYTIINCMENNSGWKVSLNYGEIIWTFQDTQEIKQRVVFKYSQMINISDYINRWIFVTIT
NNRITKSKIYINGRLIDQKPISNLGNIHASNKIMFKLDGCRDPHRYIVIKYENLFDKELS
EKEIKDLYDNQSNSGILKDFWGDYLQYDKSYYMLNLYDPNKYVDVNNVGIRGYMYLKGPR
DNVGTTNIYLNSSLYMGTKFIIKKYASGNKDNIVRNNDRVYINVVVKNKEYRLATNASQA
GVEKILSALEIPDVGNLSQVVVMKSKNDQGITNKCKMNLQDNNGNDIGFIGFHQFNNIAK
LVASNWYNRQIERSSRTLGCSWEFIPVDDGWRERPL
SEQ ID NO: 57
(Modified BoNT/A4 (M1144L) Polypeptide Sequence)
MPLVNQQINYYDPVNGVDIAYIKIPNAGKMQPVKAFKIHNKVWVIPERDIFTNPEEVDLN
PPPEAKQVPISYYDSAYLSTDNEKDNYLKGVIKLFERIYSTDLGRMLLISIVRGIPFWGG
GKIDTELKVIDTNCINIIQLDDSYRSEELNLAIIGPSANIIESQCSSFRDDVLNLTRNGY
GSTQYIRFSPDFTVGFEESLEVDTNPLLGAGKFAQDPAVALAHELIHAEHRLYGIAINTN
RVFKVNTNAYYEMAGLEVSLEELITFGGNDAKFIDSLQKKEFSLYYYNKFKDIASTLNKA
KSIVGTTASLQYMKNVFKEKYLLSEDATGKFLVDRLKFDELYKLLTEIYTEDNFVKFFKV
LNRKTYLNFDKAVFKINIVPDVNYTIHDGFNLRNTNLAANFNGQNIEINNKNFDKLKNFT
GLFEFYKLLCVRGIITSKTKSLDEGYNKALNELCIKVNNWDLFFSPSEDNFTNDLDKVEE
ITSDTNIEAAEENISLDLIQQYYLNFNFDNEPENTSIENLSSDIIGQLEPMPNIERFPNG
KKYELNKYTMFHYLRAQEFKHSNSRIILTNSAKEALLKPNIVYTFFSSKYIKAINKAVEA
VTFVNWIENLVYDFTDETNEVSTMDKIADITIVIPYIGPALNIGNMIYKGEFVEAIIFSG
AVILLEIVPEIALPVLGTFALVSYVSNKVLTVQTIDNALSKRNEKWDEVYKYIVTNWLAI
VNTQINLIREKMKKALENQAEATKAIINYQYNQYTEEEKNNINFNIDDLSSKLNESINSA
MININKFLDQCSVSYLMNSMIPYAVKRLKDFDASVRDVLLKYIYDNRGTLIGQVNRLKDK
VNNTLSADIPFQLSKYVDNKKLLSTFTEYIKNITNASILSIVYKDDDLIDLSRYGAEIYN
GDKVYYNSIDKNQIRLINLESSTIEVILKKAIVYNSMYENFSTSFWIRIPKYFNSISLNN
EYTIINCMENNSGWKVSLNYGEIIWTFQDTQEIKQRVVFKYSQMINISDYINRWIFVTIT
NNRITKSKIYINGRLIDQKPISNLGNIHASNKIMFKLDGCRDPHRYIVIKYFNLFDKELS
EKEIKDLYDNQSNSGILKDFWGDYLQYDKSYYMLNLYDPNKYVDVNNVGIRGYMYLKGPR
DNVLTTNIYLNSSLYMGTKFIIKKYASGNKDNIVRNNDRVYINVVVKNKEYRLATNASQA
GVEKILSALEIPDVGNLSQVVVMKSKNDQGITNKCKMNLQDNNGNDIGFIGFHQFNNIAK
LVASNWYNRQIERSSRTLGCSWEFIPVDDGWRERPL
SEQ ID NO: 58
(Modified BoNT/A4 (M1144T) Polypeptide Sequence)
MPLVNQQINYYDPVNGVDIAYIKIPNAGKMQPVKAFKIHNKVWVIPERDIFTNPEEVDLN
PPPEAKQVPISYYDSAYLSTDNEKDNYLKGVIKLFERIYSTDLGRMLLISIVRGIPFWGG
GKIDTELKVIDTNCINIIQLDDSYRSEELNLAIIGPSANIIESQCSSFRDDVLNLTRNGY
GSTQYIRFSPDFTVGFEESLEVDTNPLLGAGKFAQDPAVALAHELIHAEHRLYGIAINTN
RVFKVNTNAYYEMAGLEVSLEELITFGGNDAKFIDSLQKKEFSLYYYNKFKDIASTINKA
KSIVGTTASLQYMKNVFKEKYLLSEDATGKFLVDRLKFDELYKLLTEIYTEDNFVKFFKV
LNRKTYLNFDKAVFKINIVPDVNYTIHDGFNLRNTNLAANFNGQNIEINNKNFDKLKNFT
GLFEFYKLLCVRGIITSKTKSLDEGYNKALNELCIKVNNWDLFFSPSEDNFTNDLDKVEE
ITSDTNIEAAEENISLDLIQQYYLNFNFDNEPENTSIENLSSDIIGQLEPMPNIERFPNG
KKYELNKYTMFHYLRAQEFKHSNSRIILTNSAKEALLKPNIVYTFFSSKYIKAINKAVEA
VTFVNWIENLVYDFTDETNEVSTMDKIADITIVIPYIGPALNIGNMIYKGEFVEAIIFSG
AVILLEIVPEIALPVLGTFALVSYVSNKVLTVQTIDNALSKRNEKWDEVYKYIVTNWLAI
VNTQINLIREKMKKALENQAEATKAIINYQYNQYTEEEKNNINFNIDDLSSKLNESINSA
MININKFLDQCSVSYLMNSMIPYAVKRLKDFDASVRDVLLKYIYDNRGTLIGQVNRLKDK
VNNTLSADIPFQLSKYVDNKKLLSTFTEYIKNITNASILSIVYKDDDLIDLSRYGAEIYN
GDKVYYNSIDKNQIRLINLESSTIEVILKKAIVYNSMYENFSTSFWIRIPKYFNSISLNN
EYTIINCMENNSGWKVSLNYGEIIWTFQDTQEIKQRVVFKYSQMINISDYINRWIFVTIT
NNRITKSKIYINGRLIDQKPISNLGNIHASNKIMFKLDGCRDPHRYIVIKYENLEDKELS
EKEIKDLYDNQSNSGILKDFWGDYLQYDKSYYMLNLYDPNKYVDVNNVGIRGYMYLKGPR
DNVTTTNIYLNSSLYMGTKFIIKKYASGNKDNIVRNNDRVYINVVVKNKEYRLATNASQA
GVEKILSALEIPDVGNLSQVVVMKSKNDQGITNKCKMNLQDNNGNDIGFIGFHQFNNIAK
LVASNWYNRQIERSSRTLGCSWEFIPVDDGWRERPL
SEQ ID NO: 59
(Modified BoNT/A4 (M1144A) Polypeptide Sequence)
MPLVNQQINYYDPVNGVDIAYIKIPNAGKMQPVKAFKIHNKVWVIPERDIFTNPEEVDLN
PPPEAKQVPISYYDSAYLSTDNEKDNYLKGVIKLFERIYSTDLGRMLLISIVRGIPFWGG
GKIDTELKVIDTNCINIIQLDDSYRSEELNLAIIGPSANIIESQCSSFRDDVLNLTRNGY
GSTQYIRFSPDFTVGFEESLEVDTNPLLGAGKFAQDPAVALAHELIHAEHRLYGIAINTN
RVFKVNTNAYYEMAGLEVSLEELITFGGNDAKFIDSLQKKEFSLYYYNKFKDIASTLNKA
KSIVGTTASLQYMKNVFKEKYLLSEDATGKFLVDRLKFDELYKLLTEIYTEDNFVKFFKV
LNRKTYLNFDKAVFKINIVPDVNYTIHDGFNLRNTNLAANFNGQNIEINNKNFDKLKNFT
GLFEFYKLLCVRGIITSKTKSLDEGYNKALNELCIKVNNWDLFFSPSEDNFTNDLDKVEE
ITSDTNIEAAEENISLDLIQQYYLNFNFDNEPENTSIENLSSDIIGQLEPMPNIERFPNG
KKYELNKYTMFHYLRAQEFKHSNSRIILTNSAKEALLKPNIVYTFFSSKYIKAINKAVEA
VTFVNWIENLVYDFTDETNEVSTMDKIADITIVIPYIGPALNIGNMIYKGEFVEAIIFSG
AVILLEIVPEIALPVLGTFALVSYVSNKVLTVQTIDNALSKRNEKWDEVYKYIVTNWLAI
VNTQINLIREKMKKALENQAEATKAIINYQYNQYTEEEKNNINFNIDDLSSKLNESINSA
MININKFLDQCSVSYLMNSMIPYAVKRLKDFDASVRDVLLKYIYDNRGTLIGQVNRLKDK
VNNTLSADIPFQLSKYVDNKKLLSTFTEYIKNITNASILSIVYKDDDLIDLSRYGAEIYN
GDKVYYNSIDKNQIRLINLESSTIEVILKKAIVYNSMYENFSTSFWIRIPKYFNSISLNN
EYTIINCMENNSGWKVSLNYGEIIWTFQDTQEIKQRVVFKYSQMINISDYINRWIFVTIT
NNRITKSKIYINGRLIDQKPISNLGNIHASNKIMFKLDGCRDPHRYIVIKYENLEDKELS
EKEIKDLYDNQSNSGILKDFWGDYLQYDKSYYMLNLYDPNKYVDVNNVGIRGYMYLKGPR
DNVATTNIYLNSSLYMGTKFIIKKYASGNKDNIVRNNDRVYINVVVKNKEYRLATNASQA
GVEKILSALEIPDVGNLSQVVVMKSKNDQGITNKCKMNLQDNNGNDIGFIGFHQFNNIAK
LVASNWYNRQIERSSRTLGCSWEFIPVDDGWRERPL
SEQ ID NO: 60
(Modified BoNT/A4 (M11441) Polypeptide Sequence)
MPLVNQQINYYDPVNGVDIAYIKIPNAGKMQPVKAFKIHNKVWVIPERDIFTNPEEVDLN
PPPEAKQVPISYYDSAYLSTDNEKDNYLKGVIKLFERIYSTDLGRMLLISIVRGIPFWGG
GKIDTELKVIDTNCINIIQLDDSYRSEELNLAIIGPSANIIESQCSSFRDDVLNLTRNGY
GSTQYIRFSPDFTVGFEESLEVDTNPLLGAGKFAQDPAVALAHELIHAEHRLYGIAINTN
RVFKVNTNAYYEMAGLEVSLEELITFGGNDAKFIDSLQKKEFSLYYYNKFKDIASTLNKA
KSIVGTTASLQYMKNVFKEKYLLSEDATGKFLVDRLKFDELYKLLTEIYTEDNFVKFFKV
LNRKTYLNFDKAVFKINIVPDVNYTIHDGFNLRNTNLAANENGQNIEINNKNFDKLKNFT
GLFEFYKLLCVRGIITSKTKSLDEGYNKALNELCIKVNNWDLFFSPSEDNFTNDLDKVEE
ITSDTNIEAAEENISLDLIQQYYLNFNFDNEPENTSIENLSSDIIGQLEPMPNIEREPNG
KKYELNKYTMFHYLRAQEFKHSNSRIILTNSAKEALLKPNIVYTFFSSKYIKAINKAVEA
VTFVNWIENLVYDFTDETNEVSTMDKIADITIVIPYIGPALNIGNMIYKGEFVEAIIFSG
AVILLEIVPEIALPVLGTFALVSYVSNKVLTVQTIDNALSKRNEKWDEVYKYIVTNWLAI
VNTQINLIREKMKKALENQAEATKAIINYQYNQYTEEEKNNINFNIDDLSSKINESINSA
MININKFLDQCSVSYLMNSMIPYAVKRLKDFDASVRDVLLKYIYDNRGTLIGQVNRLKDK
VNNTLSADIPFQLSKYVDNKKLLSTFTEYIKNITNASILSIVYKDDDLIDLSRYGAEIYN
GDKVYYNSIDKNQIRLINLESSTIEVILKKAIVYNSMYENFSTSFWIRIPKYFNSISLNN
EYTIINCMENNSGWKVSLNYGEIIWTFQDTQEIKQRVVFKYSQMINISDYINRWIFVTIT
NNRITKSKIYINGRLIDQKPISNLGNIHASNKIMFKLDGCRDPHRYIVIKYENLEDKELS
EKEIKDLYDNQSNSGILKDFWGDYLQYDKSYYMLNLYDPNKYVDVNNVGIRGYMYLKGPR
DNVITTNIYLNSSLYMGTKFIIKKYASGNKDNIVRNNDRVYINVVVKNKEYRLATNASQA
GVEKILSALEIPDVGNLSQVVVMKSKNDQGITNKCKMNLQDNNGNDIGFIGFHQFNNIAK
LVASNWYNRQIERSSRTLGCSWEFIPVDDGWRERPL
SEQ ID NO: 61
(Modified BoNT/A4 (M1144 Deletion) Polypeptide Sequence)
MPLVNQQINYYDPVNGVDIAYIKIPNAGKMQPVKAFKIHNKVWVIPERDIFTNPEEVDLN
PPPEAKQVPISYYDSAYLSTDNEKDNYLKGVIKLFERIYSTDLGRMLLISIVRGIPFWGG
GKIDTELKVIDTNCINIIQLDDSYRSEELNLAIIGPSANIIESQCSSFRDDVLNLTRNGY
GSTQYIRFSPDFTVGFEESLEVDTNPLLGAGKFAQDPAVALAHELIHAEHRLYGIAINTN
RVFKVNTNAYYEMAGLEVSLEELITFGGNDAKFIDSLQKKEFSLYYYNKFKDIASTLNKA
KSIVGTTASLQYMKNVFKEKYLLSEDATGKFLVDRLKFDELYKLLTEIYTEDNFVKFFKV
LNRKTYLNFDKAVFKINIVPDVNYTIHDGFNLRNTNLAANENGQNIEINNKNFDKLKNFT
GLFEFYKLLCVRGIITSKTKSLDEGYNKALNELCIKVNNWDLFFSPSEDNFTNDLDKVEE
ITSDTNIEAAEENISLDLIQQYYLNFNFDNEPENTSIENLSSDIIGQLEPMPNIEREPNG
KKYELNKYTMFHYLRAQEFKHSNSRIILTNSAKEALLKPNIVYTFFSSKYIKAINKAVEA
VTFVNWIENLVYDFTDETNEVSTMDKIADITIVIPYIGPALNIGNMIYKGEFVEAIIFSG
AVILLEIVPEIALPVLGTFALVSYVSNKVLTVQTIDNALSKRNEKWDEVYKYIVTNWLAI
VNTQINLIREKMKKALENQAEATKAIINYQYNQYTEEEKNNINFNIDDLSSKLNESINSA
MININKFLDQCSVSYLMNSMIPYAVKRLKDFDASVRDVLLKYIYDNRGTLIGQVNRLKDK
VNNTLSADIPFQLSKYVDNKKLLSTFTEYIKNITNASILSIVYKDDDLIDLSRYGAEIYN
GDKVYYNSIDKNQIRLINLESSTIEVILKKAIVYNSMYENFSTSFWIRIPKYFNSISLNN
EYTIINCMENNSGWKVSLNYGEIIWTFQDTQEIKQRVVFKYSQMINISDYINRWIFVTIT
NNRITKSKIYINGRLIDQKPISNLGNIHASNKIMFKLDGCRDPHRYIVIKYENLEDKELS
EKEIKDLYDNQSNSGILKDFWGDYLQYDKSYYMLNLYDPNKYVDVNNVGIRGYMYLKGPR
DNVTTNIYLNSSLYMGTKFIIKKYASGNKDNIVRNNDRVYINVVVKNKEYRLATNASQA
GVEKILSALEIPDVGNLSQVVVMKSKNDQGITNKCKMNLQDNNGNDIGFIGFHQFNNIAK
LVASNWYNRQIERSSRTLGCSWEFIPVDDGWRERPL
SEQ ID NO: 62
(BoNT/A1 H_{cc} domain Polypeptide Sequence)
YYMLNLYDPNKYVDVNNVGIRGYMYLKGPRGSVMTTNIYLNSSLYRGTKFIIKKYASGNKDNIVRNNDRVYINVV
VKNKEYRLATNASQAGVEKILSALEIPDVGNLSQVVVMKSKNDQGITNKCKMNLQDNNGNDIGFIGFHQFNNIAK
LVASNWYNRQIERSSRTLGCSWEFIPVDDGWGERPL
SEQ ID NO: 63
(Modified BoNT/A1 H_{cc} domain (M1144V) Polypeptide Sequence)
YYMLNLYDPNKYVDVNNVGIRGYMYLKGPRGSVVTTNIYLNSSLYRGTKFIIKKYASGNKDNIVRNNDRVYINVV
VKNKEYRLATNASQAGVEKILSALEIPDVGNLSQVVVMKSKNDQGITNKCKMNLQDNNGNDIGFIGFHQFNNIAK
LVASNWYNRQIERSSRTLGCSWEFIPVDDGWGERPL
SEQ ID NO: 64
(Modified BoNT/A1 H_{cc} domain (M1144G) Polypeptide Sequence)
YYMLNLYDPNKYVDVNNVGIRGYMYLKGPRGSVGTTNIYLNSSLYRGTKFIIKKYASGNKDNIVRNNDRVYINVV
VKNKEYRLATNASQAGVEKILSALEIPDVGNLSQVVVMKSKNDQGITNKCKMNLQDNNGNDIGFIGFHQFNNIAK
LVASNWYNRQIERSSRTLGCSWEFIPVDDGWGERPL
SEQ ID NO: 65
(Modified BoNT/A1 H_{cc} domain (M1144L) Polypeptide Sequence)
YYMLNLYDPNKYVDVNNVGIRGYMYLKGPRGSVLTTNIYLNSSLYRGTKFIIKKYASGNKDNIVRNNDRVYINVV
VKNKEYRLATNASQAGVEKILSALEIPDVGNLSQVVVMKSKNDQGITNKCKMNLQDNNGNDIGFIGFHQFNNIAK
LVASNWYNRQIERSSRTLGCSWEFIPVDDGWGERPL
SEQ ID NO: 66
(Modified BoNT/A1 H_{cc} domain (M1144T) Polypeptide Sequence)
YYMLNLYDPNKYVDVNNVGIRGYMYLKGPRGSVTTTNIYLNSSLYRGTKFIIKKYASGNKDNIVRNNDRVYINVV
VKNKEYRLATNASQAGVEKILSALEIPDVGNLSQVVVMKSKNDQGITNKCKMNLQDNNGNDIGFIGFHQFNNIAK
LVASNWYNRQIERSSRTLGCSWEFIPVDDGWGERPL
SEQ ID NO: 67
(Modified BoNT/A1 H_{cc} domain (M1144A) Polypeptide Sequence)
YYMLNLYDPNKYVDVNNVGIRGYMYLKGPRGSVATTNIYLNSSLYRGTKFIIKKYASGNKDNIVRNNDRVYINVV
VKNKEYRLATNASQAGVEKILSALEIPDVGNLSQVVVMKSKNDQGITNKCKMNLQDNNGNDIGFIGFHQFNNIAK
LVASNWYNRQIERSSRTLGCSWEFIPVDDGWGERPL
SEQ ID NO: 68
(Modified BoNT/A1 H_{cc} domain (M11441) Polypeptide Sequence)
YYMLNLYDPNKYVDVNNVGIRGYMYLKGPRGSVITTNIYLNSSLYRGTKFIIKKYASGNKDNIVRNNDRVYINVV
VKNKEYRLATNASQAGVEKILSALEIPDVGNLSQVVVMKSKNDQGITNKCKMNLQDNNGNDIGFIGFHQENNIAK
LVASNWYNRQIERSSRTLGCSWEFIPVDDGWGERPL
SEQ ID NO: 69
(Modified BoNT/A1 H_{cc} domain (M1144 Deletion) Polypeptide Sequence)
YYMLNLYDPNKYVDVNNVGIRGYMYLKGPRGSVTTNIYLNSSLYRGTKFIIKKYASGNKDNIVRNNDRVYINVVV
KNKEYRLATNASQAGVEKILSALEIPDVGNLSQVVVMKSKNDQGITNKCKMNLQDNNGNDIGFIGFHQFNNIAKL
VASNWYNRQIERSSRTLGCSWEFIPVDDGWGERPL
SEQ ID NO: 70
(BoNT/A1 H_{cc} domain (Q1229K) Polypeptide Sequence)
YYMLNLYDPNKYVDVNNVGIRGYMYLKGPRGSVMTTNIYLNSSLYRGTKFIIKKYASGNKDNIVRNNDRVYINVV
VKNKEYRLATNASQAGVEKILSALEIPDVGNLSQVVVMKSKNDKGITNKCKMNLQDNNGNDIGFIGFHQFNNIAK
LVASNWYNRQIERSSRTLGCSWEFIPVDDGWGERPL
SEQ ID NO: 71
(Modified BoNT/A1 H_{cc} domain (Q1229K, M1144V) Polypeptide Sequence)
YYMLNLYDPNKYVDVNNVGIRGYMYLKGPRGSVVTTNIYLNSSLYRGTKFIIKKYASGNKDNIVRNNDRVYINVV
VKNKEYRLATNASQAGVEKILSALEIPDVGNLSQVVVMKSKNDKGITNKCKMNLQDNNGNDIGFIGFHQFNNIAK
LVASNWYNRQIERSSRTLGCSWEFIPVDDGWGERPL
SEQ ID NO: 72
(Modified BoNT/A1 H_{cc} domain (Q1229K, M1144G) Polypeptide Sequence)
YYMLNLYDPNKYVDVNNVGIRGYMYLKGPRGSVGTTNIYLNSSLYRGTKFIIKKYASGNKDNIVRNNDRVYINVV
VKNKEYRLATNASQAGVEKILSALEIPDVGNLSQVVVMKSKNDKGITNKCKMNLQDNNGNDIGFIGFHQFNNIAK
LVASNWYNRQIERSSRTLGCSWEFIPVDDGWGERPL
SEQ ID NO: 73
(Modified BoNT/A1 H_{cc} domain (Q1229K, M1144L) Polypeptide Sequence)
YYMLNLYDPNKYVDVNNVGIRGYMYLKGPRGSVLTTNIYLNSSLYRGTKFIIKKYASGNKDNIVRNNDRVYINVV
VKNKEYRLATNASQAGVEKILSALEIPDVGNLSQVVVMKSKNDKGITNKCKMNLQDNNGNDIGFIGFHQFNNIAK
LVASNWYNRQIERSSRTLGCSWEFIPVDDGWGERPL
SEQ ID NO: 74
(Modified BoNT/A1 H_{cc} domain (Q1229K, M1144T) Polypeptide Sequence)
YYMLNLYDPNKYVDVNNVGIRGYMYLKGPRGSVTTTNIYLNSSLYRGTKFIIKKYASGNKDNIVRNNDRVYINVV
VKNKEYRLATNASQAGVEKILSALEIPDVGNLSQVVVMKSKNDKGITNKCKMNLQDNNGNDIGFIGFHQFNNIAK
LVASNWYNRQIERSSRTLGCSWEFIPVDDGWGERPL
SEQ ID NO: 75
(Modified BoNT/A1 H_{cc} domain (Q1229K, M1144A) Polypeptide Sequence)
YYMLNLYDPNKYVDVNNVGIRGYMYLKGPRGSVATTNIYLNSSLYRGTKFIIKKYASGNKDNIVRNNDRVYINVV
VKNKEYRLATNASQAGVEKILSALEIPDVGNLSQVVVMKSKNDKGITNKCKMNLQDNNGNDIGFIGFHQFNNIAK
LVASNWYNRQIERSSRTLGCSWEFIPVDDGWGERPL
SEQ ID NO: 76
(Modified BoNT/A1 H_{cc} domain (Q1229K, M11441) Polypeptide Sequence)
YYMLNLYDPNKYVDVNNVGIRGYMYLKGPRGSVITTNIYLNSSLYRGTKFIIKKYASGNKDNIVRNNDRVYINVV
VKNKEYRLATNASQAGVEKILSALEIPDVGNLSQVVVMKSKNDKGITNKCKMNLQDNNGNDIGFIGFHQFNNIAK
LVASNWYNRQIERSSRTLGCSWEFIPVDDGWGERPL
SEQ ID NO: 77
(Modified BoNT/A1 H_{cc} domain (Q1229K, M1144 Deletion) Polypeptide
Sequence)
YYMLNLYDPNKYVDVNNVGIRGYMYLKGPRGSVTTNIYLNSSLYRGTKFIIKKYASGNKDNIVRNNDRVYINVVV
KNKEYRLATNASQAGVEKILSALEIPDVGNLSQVVVMKSKNDKGITNKCKMNLQDNNGNDIGFIGFHQFNNIAKL
VASNWYNRQIERSSRTLGCSWEFIPVDDGWGERPL
SEQ ID NO: 78
(BoNT/A1 H_{cc} domain (N1188R, D1213R, G1215R, N1216R, N1242R,
N1243R, S1274R, T1277R) Polypeptide Sequence)
YYMLNLYDPNKYVDVNNVGIRGYMYLKGPRGSVMTTNIYLNSSLYRGTKFIIKKYASGNKDNIVRNNDRVYINVV
VKRKEYRLATNASQAGVEKILSALEIPRVRRLSQVVVMKSKNDQGITNKCKMNLQDRRGNDIGFIGFHQFNNIAK
LVASNWYNRQIERRSRRLGCSWEFIPVDDGWGERPL
SEQ ID NO: 79
(Modified BoNT/A1 H_{cc} domain (N1188R, D1213R, G1215R, N1216R,
N1242R, N1243R, S1274R, T1277R, M1144V) Polypeptide
YYMLNLYDPNKYVDVNNVGIRGYMYLKGPRGSVVTTNIYLNSSLYRGTKFIIKKYASGNKDNIVRNNDRVYINVV
VKRKEYRLATNASQAGVEKILSALEIPRVRRLSQVVVMKSKNDQGITNKCKMNLQDRRGNDIGFIGFHQFNNIAK
LVASNWYNRQIERRSRRLGCSWEFIPVDDGWGERPL
SEQ ID NO: 80
(Modified BoNT/A1 H_{cc} domain (N1188R, D1213R, G1215R, N1216R,
N1242R, N1243R, S1274R, T1277R, M1144G) Polypeptide Sequence)
YYMLNLYDPNKYVDVNNVGIRGYMYLKGPRGSVGTTNIYLNSSLYRGTKFIIKKYASGNKDNIVRNNDRVYINVV
VKRKEYRLATNASQAGVEKILSALEIPRVRRLSQVVVMKSKNDQGITNKCKMNLQDRRGNDIGFIGFHQFNNIAK
LVASNWYNRQIERRSRRLGCSWEFIPVDDGWGERPL
SEQ ID NO: 81
(Modified BoNT/A1 H_{cc} domain (N1188R, D1213R, G1215R, N1216R,
N1242R, N1243R, S1274R, T1277R, M1144L) Polypeptide Sequence)
YYMLNLYDPNKYVDVNNVGIRGYMYLKGPRGSVLTTNIYLNSSLYRGTKFIIKKYASGNKDNIVRNNDRVYINVV
VKRKEYRLATNASQAGVEKILSALEIPRVRRLSQVVVMKSKNDQGITNKCKMNLQDRRGNDIGFIGFHQFNNIAK
LVASNWYNRQIERRSRRLGCSWEFIPVDDGWGERPL
SEQ ID NO: 82
(Modified BoNT/A1 H_{cc} domain (N1188R, D1213R, G1215R, N1216R,
N1242R, N1243R, S1274R, T1277R, M1144T) Polypeptide Sequence)
YYMLNLYDPNKYVDVNNVGIRGYMYLKGPRGSVTTTNIYLNSSLYRGTKFIIKKYASGNKDNIVRNNDRVYINVV
VKRKEYRLATNASQAGVEKILSALEIPRVRRLSQVVVMKSKNDQGITNKCKMNLQDRRGNDIGFIGFHQFNNIAK
LVASNWYNRQIERRSRRLGCSWEFIPVDDGWGERPL
SEQ ID NO: 83
(Modified BoNT/A1 H_{cc} domain (N1188R, D1213R, G1215R, N1216R,
N1242R, N1243R, S1274R, T1277R, M1144A) Polypeptide Sequence)
YYMLNLYDPNKYVDVNNVGIRGYMYLKGPRGSVATTNIYLNSSLYRGTKFIIKKYASGNKDNIVRNNDRVYINVV
VKRKEYRLATNASQAGVEKILSALEIPRVRRLSQVVVMKSKNDQGITNKCKMNLQDRRGNDIGFIGFHQFNNIAK
LVASNWYNRQIERRSRRLGCSWEFIPVDDGWGERPL
SEQ ID NO: 84
(Modified BoNT/A1 H_{cc} domain (N1188R, D1213R, G1215R, N1216R,
N1242R, N1243R, S1274R, T1277R, M11441) Polypeptide Sequence)
YYMLNLYDPNKYVDVNNVGIRGYMYLKGPRGSVITTNIYLNSSLYRGTKFIIKKYASGNKDNIVRNNDRVYINVV
VKRKEYRLATNASQAGVEKILSALEIPRVRRLSQVVVMKSKNDQGITNKCKMNLQDRRGNDIGFIGFHQFNNIAK
LVASNWYNRQIERRSRRLGCSWEFIPVDDGWGERPL
SEQ ID NO: 85
(Modified BoNT/A1 H_{cc} domain (N1188R, D1213R, G1215R, N1216R,
N1242R, N1243R, S1274R, T1277R, M1144 Deletion) Polypeptide Sequence)
YYMLNLYDPNKYVDVNNVGIRGYMYLKGPRGSVTTNIYLNSSLYRGTKFIIKKYASGNKDNIVRNNDRVYINVVV
KRKEYRLATNASQAGVEKILSALEIPRVRRLSQVVVMKSKNDQGITNKCKMNLQDRRGNDIGFIGFHQFNNIAKL
VASNWYNRQIERRSRRLGCSWEFIPVDDGWGERPL
SEQ ID NO: 86
(BoNT/A3 H_{cc} domain Polypeptide Sequence)
YYMLNLFDPNKYVDVNNIGIRGYMYLKGPRGSVMTTNIYLNSTLYMGTKFIIKKYASGNEDNIVRNNDRVYINVV
VKNKEYRLATNASQAGVEKILSALEIPDVGNLSQVVVMKSKDDQGIRNKCKMNLQDNNGNDIGFVGFHLYDNIAK
LVASNWYNRQVGKASRTFGCSWEFIPVDDGWGESSL
SEQ ID NO: 87
(Modified BoNT/A3 H_{cc} domain (M1144V) Polypeptide Sequence)
YYMLNLFDPNKYVDVNNIGIRGYMYLKGPRGSVVTTNIYLNSTLYMGTKFIIKKYASGNEDNIVRNNDRVYINVV
VKNKEYRLATNASQAGVEKILSALEIPDVGNLSQVVVMKSKDDQGIRNKCKMNLQDNNGNDIGFVGFHLYDNIAK
LVASNWYNRQVGKASRTFGCSWEFIPVDDGWGESSL
SEQ ID NO: 88
(Modified BoNT/A3 H_{cc} domain (M1144G) Polypeptide Sequence)
YYMLNLFDPNKYVDVNNIGIRGYMYLKGPRGSVGTTNIYLNSTLYMGTKFIIKKYASGNEDNIVRNNDRVYINVV
VKNKEYRLATNASQAGVEKILSALEIPDVGNLSQVVVMKSKDDQGIRNKCKMNLQDNNGNDIGFVGFHLYDNIAK
LVASNWYNRQVGKASRTFGCSWEFIPVDDGWGESSL
SEQ ID NO: 89
(Modified BoNT/A3 H_{cc} domain (M1144L) Polypeptide Sequence)
YYMLNLFDPNKYVDVNNIGIRGYMYLKGPRGSVLTTNIYLNSTLYMGTKFIIKKYASGNEDNIVRNNDRVYINVV
VKNKEYRLATNASQAGVEKILSALEIPDVGNLSQVVVMKSKDDQGIRNKCKMNLQDNNGNDIGFVGFHLYDNIAK
LVASNWYNRQVGKASRTFGCSWEFIPVDDGWGESSL
SEQ ID NO: 90
(Modified BoNT/A3 H_{cc} domain (M1144T) Polypeptide Sequence)
YYMLNLFDPNKYVDVNNIGIRGYMYLKGPRGSVTTTNIYLNSTLYMGTKFIIKKYASGNEDNIVRNNDRVYINVV
VKNKEYRLATNASQAGVEKILSALEIPDVGNLSQVVVMKSKDDQGIRNKCKMNLQDNNGNDIGFVGFHLYDNIAK
LVASNWYNRQVGKASRTFGCSWEFIPVDDGWGESSL
SEQ ID NO: 91
(Modified BoNT/A3 H_{cc} domain (M1144A) Polypeptide Sequence)
YYMLNLFDPNKYVDVNNIGIRGYMYLKGPRGSVATTNIYLNSTLYMGTKFIIKKYASGNEDNIVRNNDRVYINVV
VKNKEYRLATNASQAGVEKILSALEIPDVGNLSQVVVMKSKDDQGIRNKCKMNLQDNNGNDIGFVGFHLYDNIAK
LVASNWYNRQVGKASRTFGCSWEFIPVDDGWGESSL
SEQ ID NO: 92
(Modified BoNT/A3 H_{cc} domain (M11441) Polypeptide Sequence)
YYMLNLFDPNKYVDVNNIGIRGYMYLKGPRGSVITTNIYLNSTLYMGTKFIIKKYASGNEDNIVRNNDRVYINVV
VKNKEYRLATNASQAGVEKILSALEIPDVGNLSQVVVMKSKDDQGIRNKCKMNLQDNNGNDIGFVGFHLYDNIAK
LVASNWYNRQVGKASRTFGCSWEFIPVDDGWGESSL
SEQ ID NO: 93
(Modified BoNT/A3 H_{cc} domain (M1144 Deletion) Polypeptide Sequence)
YYMLNLFDPNKYVDVNNIGIRGYMYLKGPRGSVTTNIYLNSTLYMGTKFIIKKYASGNEDNIVRNNDRVYINVVV
KNKEYRLATNASQAGVEKILSALEIPDVGNLSQVVVMKSKDDQGIRNKCKMNLQDNNGNDIGFVGFHLYDNIAKL
VASNWYNRQVGKASRTFGCSWEFIPVDDGWGESSL
SEQ ID NO: 94
(BoNT/A4 H_{cc} domain Polypeptide Sequence)
YYMLNLYDPNKYVDVNNVGIRGYMYLKGPRDNVMTTNIYLNSSLYMGTKFIIKKYASGNKDNIVRNNDRVYINVV
VKNKEYRLATNASQAGVEKILSALEIPDVGNLSQVVVMKSKNDQGITNKCKMNLQDNNGNDIGFIGFHQFNNIAK
LVASNWYNRQIERSSRTLGCSWEFIPVDDGWRERPL
SEQ ID NO: 95
(Modified BoNT/A4 H_{cc} domain (M1144V) Polypeptide Sequence)
YYMLNLYDPNKYVDVNNVGIRGYMYLKGPRDNVVTTNIYLNSSLYMGTKFIIKKYASGNKDNIVRNNDRVYINVV
VKNKEYRLATNASQAGVEKILSALEIPDVGNLSQVVVMKSKNDQGITNKCKMNLQDNNGNDIGFIGFHQFNNIAK
LVASNWYNRQIERSSRTLGCSWEFIPVDDGWRERPL
SEQ ID NO: 96
(Modified BoNT/A4 H_{cc} domain (M1144G) Polypeptide Sequence)
YYMLNLYDPNKYVDVNNVGIRGYMYLKGPRDNVGTTNIYLNSSLYMGTKFIIKKYASGNKDNIVRNNDRVYINVV
VKNKEYRLATNASQAGVEKILSALEIPDVGNLSQVVVMKSKNDQGITNKCKMNLQDNNGNDIGFIGFHQFNNIAK
LVASNWYNRQIERSSRTLGCSWEFIPVDDGWRERPL
SEQ ID NO: 97
(Modified BoNT/A4 H_{cc} domain (M1144L) Polypeptide Sequence)
YYMLNLYDPNKYVDVNNVGIRGYMYLKGPRDNVLTTNIYLNSSLYMGTKFIIKKYASGNKDNIVRNNDRVYINVV
VKNKEYRLATNASQAGVEKILSALEIPDVGNLSQVVVMKSKNDQGITNKCKMNLQDNNGNDIGFIGFHQFNNIAK
LVASNWYNRQIERSSRTLGCSWEFIPVDDGWRERPL
SEQ ID NO: 98
(Modified BoNT/A4 H_{cc} domain (M1144T) Polypeptide Sequence)
YYMLNLYDPNKYVDVNNVGIRGYMYLKGPRDNVTTTNIYLNSSLYMGTKFIIKKYASGNKDNIVRNNDRVYINVV
VKNKEYRLATNASQAGVEKILSALEIPDVGNLSQVVVMKSKNDQGITNKCKMNLQDNNGNDIGFIGFHQFNNIAK
LVASNWYNRQIERSSRTLGCSWEFIPVDDGWRERPL
SEQ ID NO: 99
(Modified BoNT/A4 H_{cc} domain (M1144A) Polypeptide Sequence)
YYMLNLYDPNKYVDVNNVGIRGYMYLKGPRDNVATTNIYLNSSLYMGTKFIIKKYASGNKDNIVRNNDRVYINVV
VKNKEYRLATNASQAGVEKILSALEIPDVGNLSQVVVMKSKNDQGITNKCKMNLQDNNGNDIGFIGFHQFNNIAK
LVASNWYNRQIERSSRTLGCSWEFIPVDDGWRERPL
SEQ ID NO: 100
(Modified BoNT/A4 H_{cc} domain (M11441) Polypeptide Sequence)
YYMLNLYDPNKYVDVNNVGIRGYMYLKGPRDNVITTNIYLNSSLYMGTKFIIKKYASGNKDNIVRNNDRVYINVV
VKNKEYRLATNASQAGVEKILSALEIPDVGNLSQVVVMKSKNDQGITNKCKMNLQDNNGNDIGFIGFHQFNNIAK
LVASNWYNRQIERSSRTLGCSWEFIPVDDGWRERPL
SEQ ID NO: 101
(Modified BoNT/A4 H_{cc} domain (M1144 Deletion) Polypeptide Sequence)
YYMLNLYDPNKYVDVNNVGIRGYMYLKGPRDNVTTNIYLNSSLYMGTKFIIKKYASGNKDNIVRNNDRVYINVVV
KNKEYRLATNASQAGVEKILSALEIPDVGNLSQVVVMKSKNDQGITNKCKMNLQDNNGNDIGFIGFHQENNIAK
LVASNWYNRQIERSSRTLGCSWEFIPVDDGWRERPL
SEQ ID NO: 102
(Modified SV2 Binding Domain Consensus Sequence 1)
RX1X2VX3TTNIYLNSX4LYX5GT, wherein: X1 is D or G; X2 is S or N; X3 is an
amino acid that is resistant to oxidation; X4 is S or T; and X5 is M
or R.
SEQ ID NO: 103
(BoNT/A1 Hall Str (Reference) SV2 Binding Domain)
RGSVMTTNIYLNSSLYRGT
SEQ ID NO: 104
(BoNT/A1 CDC297 SV2 Binding Domain)
RGNVMTTNIYLNSSLYMGT
SEQ ID NO: 105
(BoNT/A3 Loch Maree SV2 Binding Domain)
RGSVMTTNIYLNSTLYMGT
SEQ ID NO: 106
(BoNT/A4 SV2 Binding Domain)
RDNVMTTNIYLNSSLYMGT
SEQ ID NO: 107
(Modified SV2 Binding Domain Consensus Sequence 2)
RGSVXTTNIYLNSSLYRGT, wherein X is an amino acid that is resistant to
oxidation.
SEQ ID NO: 108
(Modified SV2 Binding Domain Consensus Sequence 3)
RGNVXTTNIYLNSSLYMGT, wherein X is an amino acid that is resistant to
oxidation.
SEQ ID NO: 109
(Modified SV2 Binding Domain Consensus Sequence 4)
RGSVXTTNIYLNSTLYMGT, wherein X is an amino acid that is resistant to
oxidation.
SEQ ID NO: 110
(Modified SV2 Binding Domain Consensus Sequence 5)
RDNVXTTNIYLNSSLYMGT, wherein X is an amino acid that is resistant to
oxidation.
SEQ ID NO: 111
(Modified SV2 Binding Domain Consensus Sequence 6)
RX1X2VTTNIYLNSX3LYX4GT, wherein: X1 is D or G; X2 is S or N; X3 is S or
T; and X4 is M or R.
SEQ ID NO: 112
(Modified SV2 Binding Domain A)
RGSVTTNIYLNSSLYRGT
SEQ ID NO: 113
(Modified SV2 Binding Domain B)
RGNVTTNIYLNSSLYMGT
SEQ ID NO: 114
(Modified SV2 Binding Domain C)
RGSVTTNIYLNSTLYMGT
SEQ ID NO: 115
Modified SV2 Binding Domain D)
RDNVTTNIYLNSSLYMGT
SEQ ID NO: 116
(Influenza Virus Haemagglutinin)
GLFGAIAGFIENGWEGMIDGWYG
SEQ ID NO: 117
(Leucine-Based Motif 1)
xDxxxLL, wherein x is any amino acid.
SEQ ID NO: 118
(Leucine-Based Motif 2)
xExxxLL, wherein x is any amino acid.
SEQ ID NO: 119
(Leucine-Based Motif 3)
xExxxIL, wherein x is any amino acid.
SEQ ID NO: 120
(Leucine-Based Motif 4)
xExxxLM, wherein x is any amino acid.
SEQ ID NO: 121
(Tyrosine-based Motif)
Y-x-x-Hy, wherein Hy is a hydrophobic amino acid and wherein x is any
amino acid.
SEQ ID NO: 122
(TEV Cleavage Site)
ENLYFQG
SEQ ID NO: 123
(Thrombin Cleavage Site)
LVPRGS
SEQ ID NO: 124
(PreScission Cleavage Site)
LEVLFQGP
SEQ ID NO: 125
(Enterokinase Cleavage Site)
DDDDK
SEQ ID NO: 126
(Factor Xa Cleavage Site 1)
IEGR
SEQ ID NO: 127
(Factor Xa Cleavage Site 2)
IDGR
SEQ ID NO: 128
(Polypeptide Sequence of BoNT/B - UniProt P10844)
MPVTINNFNYNDPIDNNNIIMMEPPFARGTGRYYKAFKITDRIWIIPERYTFGYKPEDFN
KSSGIFNRDVCEYYDPDYLNTNDKKNIFLQTMIKLFNRIKSKPLGEKLLEMIINGIPYLG
DRRVPLEEFNTNIASVTVNKLISNPGEVERKKGIFANLIIFGPGPVLNENETIDIGIQNH
FASREGFGGIMQMKFCPEYVSVFNNVQENKGASIFNRRGYFSDPALILMHELIHVLHGLY
GIKVDDLPIVPNEKKFFMQSTDAIQAEELYTFGGQDPSIITPSTDKSIYDKVLQNFRGIV
DRLNKVLVCISDPNININIYKNKFKDKYKFVEDSEGKYSIDVESFDKLYKSLMFGFTETN
IAENYKIKTRASYFSDSLPPVKIKNLLDNEIYTIEEGFNISDKDMEKEYRGQNKAINKQA
YEEISKEHLAVYKIQMCKSVKAPGICIDVDNEDLFFIADKNSFSDDLSKNERIEYNTQSN
YIENDFPINELILDTDLISKIELPSENTESLTDFNVDVPVYEKQPAIKKIFTDENTIFQY
LYSQTFPLDIRDISLTSSFDDALLFSNKVYSFFSMDYIKTANKVVEAGLFAGWVKQIVND
FVIEANKSNTMDKIADISLIVPYIGLALNVGNETAKGNFENAFEIAGASILLEFIPELLI
PVVGAFLLESYIDNKNKIIKTIDNALTKRNEKWSDMYGLIVAQWLSTVNTQFYTIKEGMY
KALNYQAQALEEIIKYRYNIYSEKEKSNINIDFNDINSKLNEGINQAIDNINNFINGCSV
SYLMKKMIPLAVEKLLDFDNTLKKNLLNYIDENKLYLIGSAEYEKSKVNKYLKTIMPFDL
SIYTNDTILIEMFNKYNSEILNNIILNLRYKDNNLIDLSGYGAKVEVYDGVELNDKNQFK
LTSSANSKIRVTQNQNIIFNSVFLDFSVSFWIRIPKYKNDGIQNYIHNEYTIINCMKNNS
GWKISIRGNRIIWTLIDINGKTKSVFFEYNIREDISEYINRWFFVTITNNLNNAKIYING
KLESNTDIKDIREVIANGEIIFKLDGDIDRTQFIWMKYFSIFNTELSQSNIEERYKIQSY
SEYLKDFWGNPLMYNKEYYMFNAGNKNSYIKLKKDSPVGEILTRSKYNQNSKYINYRDLY
IGEKFIIRRKSNSQSINDDIVRKEDYIYLDFFNLNQEWRVYTYKYFKKEEEKLFLAPISD
SDEFYNTIQIKEYDEQPTYSCQLLFKKDEESTDEIGLIGIHRFYESGIVFEEYKDYFCIS
KWYLKEVKRKPYNLKLGCNWQFIPKDEGWTE
SEQ ID NO: 129
(Polypeptide Sequence of BoNT/C - UniProt P18640)
MPITINNFNYSDPVDNKNILYLDTHLNTLANEPEKAFRITGNIWVIPDRFSRNSNPNLNK
PPRVTSPKSGYYDPNYLSTDSDKDPFLKEIIKLFKRINSREIGEELIYRLSTDIPFPGNN
NTPINTFDFDVDFNSVDVKTRQGNNWVKTGSINPSVIITGPRENIIDPETSTFKLTNNTF
AAQEGFGALSIISISPRFMLTYSNATNDVGEGRFSKSEFCMDPILILMHELNHAMHNLYG
IAIPNDQTISSVTSNIFYSQYNVKLEYAEIYAFGGPTIDLIPKSARKYFEEKALDYYRSI
AKRLNSITTANPSSFNKYIGEYKQKLIRKYRFVVESSGEVTVNRNKFVELYNELTQIFTE
FNYAKIYNVQNRKIYLSNVYTPVTANILDDNVYDIQNGFNIPKSNLNVLFMGQNLSRNPA
LRKVNPENMLYLFTKFCHKAIDGRSLYNKTLDCRELLVKNTDLPFIGDISDVKTDIFLRK
DINEETEVIYYPDNVSVDQVILSKNTSEHGQLDLLYPSIDSESEILPGENQVFYDNRTQN
VDYLNSYYYLESQKLSDNVEDFTFTRSIEEALDNSAKVYTYFPTLANKVNAGVQGGLFLM
WANDVVEDFTTNILRKDTLDKISDVSAIIPYIGPALNISNSVRRGNFTEAFAVTGVTILL
EAFPEFTIPALGAFVIYSKVQERNEIIKTIDNCLEQRIKRWKDSYEWMMGTWLSRIITQF
NNISYQMYDSLNYQAGAIKAKIDLEYKKYSGSDKENIKSQVENLKNSLDVKISEAMNNIN
KFIRECSVTYLFKNMLPKVIDELNEFDRNTKAKLINLIDSHNIILVGEVDKLKAKVNNSF
QNTIPFNIFSYTNNSLLKDIINEYFNNINDSKILSLQNRKNTLVDTSGYNAEVSEEGDVQ
LNPIFPFDFKLGSSGEDRGKVIVTQNENIVYNSMYESFSISFWIRINKWVSNLPGYTIID
SVKNNSGWSIGIISNFLVFTLKQNEDSEQSINFSYDISNNAPGYNKWFFVTVTNNMMGNM
KIYINGKLIDTIKVKELTGINFSKTITFEINKIPDTGLITSDSDNINMWIRDFYIFAKEL
DGKDINILFNSLQYTNVVKDYWGNDLRYNKEYYMVNIDYLNRYMYANSRQIVFNTRRNNN
DFNEGYKIIIKRIRGNTNDTRVRGGDILYFDMTINNKAYNLFMKNETMYADNHSTEDIYA
IGLREQTKDINDNIIFQIQPMNNTYYYASQIFKSNFNGENISGICSIGTYRFRLGGDWYR
HNYLVPTVKQGNYASLLESTSTHWGFVPVSE
SEQ ID NO: 130
(Polypeptide Sequence of BoNT/D - UniProt P19321)
MTWPVKDFNYSDPVNDNDILYLRIPQNKLITTPVKAFMITQNIWVIPERFSSDTNPSLSK
PPRPTSKYQSYYDPSYLSTDEQKDTFLKGIIKLFKRINERDIGKKLINYLVVGSPFMGDS
STPEDTFDFTRHTTNIAVEKFENGSWKVTNIITPSVLIFGPLPNILDYTASLTLQGQQSN
PSFEGFGTLSILKVAPEFLLTFSDVTSNQSSAVLGKSIFCMDPVIALMHELTHSLHQLYG
INIPSDKRIRPQVSEGFFSQDGPNVQFEELYTFGGLDVEIIPQIERSQLREKALGHYKDI
AKRLNNINKTIPSSWISNIDKYKKIFSEKYNFDKDNTGNFVVNIDKFNSLYSDLTNVMSE
VVYSSQYNVKNRTHYFSRHYLPVFANILDDNIYTIRDGFNLINKGFNIENSGQNIERNPA
LQKLSSESVVDLFTKVCLRLTKNSRDDSTCIKVKNNRLPYVADKDSISQEIFENKIITDE
TNVQNYSDKFSLDESILDGQVPINPEIVDPLLPNVNMEPLNLPGEEIVFYDDITKYVDYL
NSYYYLESQKLSNNVENITLTTSVEEALGYSNKIYTFLPSLAEKVNKGVQAGLFLNWANE
VVEDFTTNIMKKDTLDKISDVSVIIPYIGPALNIGNSALRGNFNQAFATAGVAFLLEGFP
EFTIPALGVFTFYSSIQEREKIIKTIENCLEQRVKRWKDSYQWMVSNWLSRITTQFNHIN
YQMYDSLSYQADAIKAKIDLEYKKYSGSDKENIKSQVENLKNSLDVKISEAMNNINKFIR
ECSVTYLFKNMLPKVIDELNKFDLRTKTELINLIDSHNIILVGEVDRLKAKVNESFENTM
PFNIFSYTNNSLLKDIINEYFNSINDSKILSLQNKKNALVDTSGYNAEVRVGDNVQLNTI
YTNDFKLSSSGDKIIVNLNNNILYSAIYENSSVSFWIKISKDLTNSHNEYTIINSIEQNS
GWKLCIRNGNIEWILQDVNRKYKSLIFDYSESLSHTGYTNKWFFVTITNNIMGYMKLYIN
GELKQSQKIEDLDEVKLDKTIVFGIDENIDENQMLWIRDFNIFSKELSNEDINIVYEGQI
LRNVIKDYWGNPLKFDTEYYIINDNYIDRYIAPESNVLVLVQYPDRSKLYTGNPITIKSV
SDKNPYSRILNGDNIILHMLYNSRKYMIIRDTDTIYATQGGECSQNCVYALKLQSNLGNY
GIGIFSIKNIVSKNKYCSQIFSSFRENTMLLADIYKPWRFSFKNAYTPVAVTNYETKLLS
TSSFWKFISRDPGWVE
SEQ ID NO: 131
(Polypeptide Sequence of BoNT/E - UniProt Q00496)
MPKINSFNYNDPVNDRTILYIKPGGCQEFYKSFNIMKNIWIIPERNVIGTTPQDFHPPTS
LKNGDSSYYDPNYLQSDEEKDRFLKIVTKIFNRINNNLSGGILLEELSKANPYLGNDNTP
DNQFHIGDASAVEIKFSNGSQDILLPNVIIMGAEPDLFETNSSNISLRNNYMPSNHRFGS
IAIVTFSPEYSFRFNDNCMNEFIQDPALTLMHELIHSLHGLYGAKGITTKYTITQKQNPL
ITNIRGTNIEEFLTFGGTDLNIITSAQSNDIYTNLLADYKKIASKLSKVQVSNPLLNPYK
DVFEAKYGLDKDASGIYSVNINKFNDIFKKLYSFTEFDLRTKFQVKCRQTYIGQYKYFKL
SNLLNDSIYNISEGYNINNLKVNFRGQNANLNPRIITPITGRGLVKKIIRFCKNIVSVKG
IRKSICIEINNGELFFVASENSYNDDNINTPKEIDDTVTSNNNYENDLDQVILNFNSESA
PGLSDEKLNLTIQNDAYIPKYDSNGTSDIEQHDVNELNVFFYLDAQKVPEGENNVNLTSS
IDTALLEQPKIYTFFSSEFINNVNKPVQAALFVSWIQQVLVDFTTEANQKSTVDKIADIS
IVVPYIGLALNIGNEAQKGNFKDALELLGAGILLEFEPELLIPTILVFTIKSFLGSSDNK
NKVIKAINNALKERDEKWKEVYSFIVSNWMTKINTQFNKRKEQMYQALQNQVNAIKTIIE
SKYNSYTLEEKNELTNKYDIKQIENELNQKVSIAMNNIDRFLTESSISYLMKIINEVKIN
KLREYDENVKTYLLNYIIQHGSILGESQQELNSMVTDTLNNSIPFKLSSYTDDKILISYF
NKFFKRIKSSSVLNMRYKNDKYVDTSGYDSNININGDVYKYPTNKNQFGIYNDKLSEVNI
SQNDYIIYDNKYKNFSISFWVRIPNYDNKIVNVNNEYTIINCMRDNNSGWKVSLNHNEII
WTFEDNRGINQKLAFNYGNANGISDYINKWIFVTITNDRLGDSKLYINGNLIDQKSILNL
GNIHVSDNILFKIVNCSYTRYIGIRYFNIFDKELDETEIQTLYSNEPNTNILKDFWGNYL
LYDKEYYLLNVLKPNNFIDRRKDSTLSINNIRSTILLANRLYSGIKVKIQRVNNSSTNDN
LVRKNDQVYINFVASKTHLFPLYADTATTNKEKTIKISSSGNRFNQVVVMNSVGNCTMNF
KNNNGNNIGLLGFKADTVVASTWYYTHMRDHTNSNGCFWNFISEEHGWQEK
SEQ ID NO: 132
(Polypeptide Sequence of BoNT/F - UniProt A7GBG3)
MPVVINSFNYNDPVNDDTILYMQIPYEEKSKKYYKAFEIMRNVWIIPERNTIGTDPSDFD
PPASLENGSSAYYDPNYLTTDAEKDRYLKTTIKLFKRINSNPAGEVLLQEISYAKPYLGN
EHTPINEFHPVTRTTSVNIKSSTNVKSSIILNLLVLGAGPDIFENSSYPVRKLMDSGGVY
DPSNDGFGSINIVTFSPEYEYTFNDISGGYNSSTESFIADPAISLAHELIHALHGLYGAR
GVTYKETIKVKQAPLMIAEKPIRLEEFLTFGGQDLNIITSAMKEKIYNNLLANYEKIATR
LSRVNSAPPEYDINEYKDYFQWKYGLDKNADGSYTVNENKFNEIYKKLYSFTEIDLANKF
KVKCRNTYFIKYGFLKVPNLLDDDIYTVSEGFNIGNLAVNNRGQNIKLNPKIIDSIPDKG
LVEKIVKFCKSVIPRKGTKAPPRLCIRVNNRELFFVASESSYNENDINTPKEIDDTTNLN
NNYRNNLDEVILDYNSETIPQISNQTLNTLVQDDSYVPRYDSNGTSEIEEHNVVDLNVFF
YLHAQKVPEGETNISLTSSIDTALSEESQVYTFFSSEFINTINKPVHAALFISWINQVIR
DFTTEATQKSTFDKIADISLVVPYVGLALNIGNEVQKENFKEAFELLGAGILLEFVPELL
IPTILVFTIKSFIGSSENKNKIIKAINNSLMERETKWKEIYSWIVSNWLTRINTQFNKRK
EQMYQALQNQVDAIKTVIEYKYNNYTSDERNRLESEYNINNIREELNKKVSLAMENIERF
ITESSIFYLMKLINEAKVSKLREYDEGVKEYLLDYISEHRSILGNSVQELNDLVTSTLNN
SIPFELSSYTNDKILILYFNKLYKKIKDNSILDMRYENNKFIDISGYGSNISINGDVYIY
STNRNQFGIYSSKPSEVNIAQNNDIIYNGRYQNFSISFWVRIPKYFNKVNLNNEYTIIDC
IRNNNSGWKISLNYNKIIWTLQDTAGNNQKLVFNYTQMISISDYINKWIFVTITNNRLGN
SRIYINGNLIDEKSISNLGDIHVSDNILFKIVGCNDTRYVGIRYFKVFDTELGKTEIETL
YSDEPDPSILKDFWGNYLLYNKRYYLLNLLRTDKSITQNSNFLNINQQRGVYQKPNIFSN
TRLYTGVEVIIRKNGSTDISNTDNFVRKNDLAYINVVDRDVEYRLYADISIAKPEKIIKL
IRTSNSNNSLGQIIVMDSIGNNCTMNFQNNNGGNIGLLGFHSNNLVASSWYYNNIRKNTS
SNGCFWSFISKEHGWQEN
SEQ ID NO: 133
(Polypeptide Sequence of BoNT/G - UniProt Q60393)
MPVNIKXFNYNDPINNDDIIMMEPFNDPGPGTYYKAFRIIDRIWIVPERFTYGFQPDQFN
ASTGVFSKDVYEYYDPTYLKTDAEKDKFLKTMIKLFNRINSKPSGQRLLDMIVDAIPYLG
NASTPPDKFAANVANVSINKKIIQPGAEDQIKGLMTNLIIFGPGPVLSDNFTDSMIMNGH
SPISEGFGARMMIRFCPSCLNVFNNVQENKDTSIFSRRAYFADPALTLMHELIHVLHGLY
GIKISNLPITPNTKEFFMQHSDPVQAEELYTFGGHDPSVISPSTDMNIYNKALQNFQDIA
NRLNIVSSAQGSGIDISLYKQIYKNKYDFVEDPNGKYSVDKDKFDKLYKALMFGFTETNL
AGEYGIKTRYSYFSEYLPPIKTEKLLDNTIYTQNEGFNIASKNLKTEFNGQNKAVNKEAY
EEISLEHLVIYRIAMCKPVMYKNTGKSEQCIIVNNEDLFFIANKDSFSKDLAKAETIAYN
TQNNTIENNFSIDQLILDNDLSSGIDLPNENTEPFTNFDDIDIPVYIKQSALKKIFVDGD
SLFEYLHAQTFPSNIENLQLTNSLNDALRNNNKVYTFFSTNLVEKANTVVGASLFVNWVK
GVIDDFTSESTQKSTIDKVSDVSIIIPYIGPALNVGNETAKENFKNAFEIGGAAILMEFI
PELIVPIVGFFTLESYVGNKGHIIMTISNALKKRDQKWTDMYGLIVSQWLSTVNTQFYTI
KERMYNALNNQSQAIEKIIEDQYNRYSEEDKMNINIDFNDIDFKLNQSINLAINNIDDFI
NQCSISYLMNRMIPLAVKKLKDFDDNLKRDLLEYIDTNELYLLDEVNILKSKVNRHLKDS
IPFDLSLYTKDTILIQVFNNYISNISSNAILSLSYRGGRLIDSSGYGATMNVGSDVIFND
IGNGQFKLNNSENSNITAHQSKFVVYDSMFDNFSINFWVRTPKYNNNDIQTYLQNEYTII
SCIKNDSGWKVSIKGNRIIWTLIDVNAKSKSIFFEYSIKDNISDYINKWFSITITNDRLG
NANIYINGSLKKSEKILNLDRINSSNDIDFKLINCTDTTKFVWIKDFNIFGRELNATEVS
SLYWIQSSTNTLKDFWGNPLRYDTQYYLFNQGMQNIYIKYFSKASMGETAPRTNFNNAAI
NYQNLYLGLRFIIKKASNSRNINNDNIVREGDYIYLNIDNISDESYRVYVLVNSKEIQTQ
LFLAPINDDPTFYDVLQIKKYYEKTTYNCQILCEKDTKTFGLFGIGKFVKDYGYVWDTYD
NYFCISQWYLRRISENINKLRLGCNWQFIPVDEGWTE
SEQ ID NO: 134
(Polypeptide Sequence of TeNT - UniProt P04958)
MPITINNFRYSDPVNNDTIIMMEPPYCKGLDIYYKAFKITDRIWIVPERYEFGTKPEDFN
PPSSLIEGASEYYDPNYLRTDSDKDRFLQTMVKLFNRIKNNVAGEALLDKIINAIPYLGN
SYSLLDKFDTNSNSVSFNLLEQDPSGATTKSAMLTNLIIFGPGPVLNKNEVRGIVLRVDN
KNYFPCRDGFGSIMQMAFCPEYVPTFDNVIENITSLTIGKSKYFQDPALLLMHELIHVLH
GLYGMQVSSHEIIPSKQEIYMQHTYPISAEELFTFGGQDANLISIDIKNDLYEKTLNDYK
AIANKLSQVTSCNDPNIDIDSYKQIYQQKYQFDKDSNGQYIVNEDKFQILYNSIMYGFTE
IELGKKFNIKTRLSYFSMNHDPVKIPNLLDDTIYNDTEGFNIESKDLKSEYKGQNMRVNT
NAFRNVDGSGLVSKLIGLCKKIIPPTNIRENLYNRTASLTDLGGELCIKIKNFDLTFIAE
KNSFSEEPFQDEIVSYNTKNKPLNFNYSLDKIIVDYNLQSKITLPNDRTTPVTKGIPYAP
EYKSNAASTIEIHNIDDNTIYQYLYAQKSPTTLQRITMTNSVDDALINSTKIYSYFPSVI
SKVNQGAQGILFLQWVRDIIDDFTNESSQKTTIDKISDVSTIVPYIGPALNIVKQGYEGN
FIGALETTGVVLLLEYIPEITLPVIAALSIAESSTQKEKIIKTIDNFLEKRYEKWIEVYK
LVKAKWLGTVNTQFQKRSYQMYRSLEYQVDAIKKIIDYEYKIYSGPDKEQIADEINNLKN
KLEEKANKAMININIFMRESSRSFLVNQMINEAKKQLLEFDTQSKNILMQYIKANSKFIG
ITELKKLESKINKVFSTPIPFSYSKNLDCWVDNEEDIDVILKKSTILNLDINNDIISDIS
GFNSSVITYPDAQLVPGINGKAIHLVNNESSEVIVHKAMDIEYNDMFNNFTVSFWLRVPK
VSASHLEQYGTNEYSIISSMKKHSLSIGSGWSVSLKGNNLIWTLKDSAGEVRQITFRDLP
DKFNAYLANKWVFITITNDRLSSANLYINGVLMGSAEITGLGAIREDNNITLKLDRCNNN
NQYVSIDKFRIFCKALNPKEIEKLYTSYLSITFLRDFWGNPLRYDTEYYLIPVASSSKDV
QLKNITDYMYLTNAPSYTNGKLNIYYRRLYNGLKFIIKRYTPNNEIDSFVKSGDFIKLYV
SYNNNEHIVGYPKDGNAFNNLDRILRVGYNAPGIPLYKKMEAVKLRDLKTYSVQLKLYDD
KNASLGLVGTHNGQIGNDPNRDILIASNWYFNHLKDKILGCDWYFVPTDEGWTND
SEQ ID NO: 135
(Polypeptide Sequence of BoNT/X)
MKLEINKFNYNDPIDGINVITMRPPRHSDKINKGKGPFKAFQVIKNIWIVPERYNFTNNT
NDLNIPSEPIMEADAIYNPNYLNTPSEKDEFLQGVIKVLERIKSKPEGEKLLELISSSIP
LPLVSNGALTLSDNETIAYQENNNIVSNLQANLVIYGPGPDIANNATYGLYSTPISNGEG
TLSEVSFSPFYLKPFDESYGNYRSLVNIVNKFVKREFAPDPASTLMHELVHVTHNLYGIS
NRNFYYNFDTGKIETSRQQNSLIFEELLTFGGIDSKAISSLIIKKIIETAKNNYTTLISE
RLNTVTVENDLLKYIKNKIPVQGRLGNFKLDTAEFEKKLNTILFVLNESNLAQRFSILVR
KHYLKERPIDPIYVNILDDNSYSTLEGFNISSQGSNDFQGQLLESSYFEKIESNALRAFI
KICPRNGLLYNAIYRNSKNYLNNIDLEDKKTTSKTNVSYPCSLLNGCIEVENKDLFLISN
KDSLNDINLSEEKIKPETTVFFKDKLPPQDITLSNYDFTEANSIPSISQQNILERNEELY
EPIRNSLFEIKTIYVDKLTTFHFLEAQNIDESIDSSKIRVELTDSVDEALSNPNKVYSPF
KNMSNTINSIETGITSTYIFYQWLRSIVKDFSDETGKIDVIDKSSDTLAIVPYIGPLLNI
GNDIRHGDFVGAIELAGITALLEYVPEFTIPILVGLEVIGGELAREQVEAIVNNALDKRD
QKWAEVYNITKAQWWGTIHLQINTRLAHTYKALSRQANAIKMNMEFQLANYKGNIDDKAK
IKNAISETEILLNKSVEQAMKNTEKFMIKLSNSYLTKEMIPKVQDNLKNFDLETKKTLDK
FIKEKEDILGTNLSSSLRRKVSIRLNKNIAFDINDIPFSEFDDLINQYKNEIEDYEVLNL
GAEDGKIKDLSGTTSDINIGSDIELADGRENKAIKIKGSENSTIKIAMNKYLRFSATDNF
SISFWIKHPKPTNLLNNGIEYTLVENFNQRGWKISIQDSKLIWYLRDHNNSIKIVTPDYI
AFNGWNLITITNNRSKGSIVYVNGSKIEEKDISSIWNTEVDDPIIFRLKNNRDTQAFTLL
DQFSIYRKELNQNEVVKLYNYYFNSNYIRDIWGNPLQYNKKYYLQTQDKPGKGLIREYWS
SFGYDYVILSDSKTITFPNNIRYGALYNGSKVLIKNSKKLDGLVRNKDFIQLEIDGYNMG
ISADRFNEDTNYIGTTYGTTHDLTTDFEIIQRQEKYRNYCQLKTPYNIFHKSGLMSTETS
KPTFHDYRDWVYSSAWYFQNYENLNLRKHTKINWYFIPKDEGWDED
SEQ ID NO: 136
(Modified BoNT/A1 (M1144V) Nucleic Acid Sequence)
ATGCCGTTTGTGAACAAACAGTTCAACTATAAAGATCCGGTGAACGGTGTTGATATCGCCTATATCAA
AATTCCGAATGCAGGTCAGATGCAGCCGGTTAAAGCCTTTAAAATCCATAACAAAATTTGGGTGATTC
CGGAACGTGATACCTTTACCAATCCGGAAGAAGGTGATCTGAATCCGCCTCCGGAAGCAAAACAGGTT
CCGGTTAGCTATTATGATAGCACCTATCTGAGCACCGATAACGAGAAAGATAACTATCTGAAAGGTGT
GACCAAACTGTTTGAACGCATTTATAGTACCGATCTGGGTCGTATGCTGCTGACCAGCATTGTTCGTG
GTATTCCGTTTTGGGGTGGTAGCACCATTGATACCGAACTGAAAGTTATTGACACCAACTGCATTAAT
GTGATTCAGCCGGATGGTAGCTATCGTAGCGAAGAACTGAATCTGGTTATTATTGGTCCGAGCGCAGA
TATCATTCAGTTTGAATGTAAATCCTTTGGCCACGAAGTTCTGAATCTGACCCGTAATGGTTATGGTA
GTACCCAGTATATTCGTTTCAGTCCGGATTTTACCTTTGGCTTTGAAGAAAGCCTGGAAGTTGATACA
AATCCGCTGTTAGGTGCAGGTAAATTTGCAACCGATCCGGCAGTTACCCTGGCACATGAACTGATTCA
TGCCGGTCATCGTCTGTATGGTATTGCAATTAATCCGAACCGTGTGTTCAAAGTGAATACCAACGCAT
ATTATGAAATGAGCGGTCTGGAAGTGTCATTTGAAGAACTGCGTACCTTTGGTGGTCATGATGCCAAA
TTTATCGATAGCCTGCAAGAAAATGAATTTCGCCTGTACTACTATAACAAATTCAAGGATATTGCGAG
CACCCTGAATAAAGCCAAAAGCATTGTTGGCACCACCGCAAGCCTGCAGTATATGAAAAATGTGTTTA
AAGAAAAATATCTGCTGAGCGAAGATACCAGCGGTAAATTTAGCGTTGACAAACTGAAATTCGATAAA
CTGTACAAGATGCTGACCGAGATTTATACCGAAGATAACTTCGTGAAGTTTTTCAAAGTGCTGAACCG
CAAAACCTACCTGAACTTTGATAAAGCCGTGTTCAAAATCAACATCGTGCCGAAAGTGAACTATACCA
TCTATGATGGTTTTAACCTGCGCAATACCAATCTGGCAGCAAACTTTAATGGTCAGAACACCGAAATC
AACAACATGAACTTTACCAAACTGAAGAACTTCACCGGTCTGTTCGAATTTTACAAACTGCTGTGTGT
TCGTGGCATTATTACCtCCAAAACCAAAAGCCTGGATAAAGGTTATAACAAAGCCCTGAATGACCTGT
GCATTAAAGTGAATAATTGGGACCTGTTTTTTAGCCCGAGCGAAGATAACTTTACCAACGATCTGAAT
AAAGGCGAAGAAATTACCAGCGATACCAATATTGAAGCAGCCGAAGAAAACATTAGCCTGGATCTGAT
TCAGCAGTATTATCTGACCTTCAACTTTGATAACGAGCCGGAAAATATCAGCATTGAAAATCTGAGCA
GCGATATTATTGGTCAGCTGGAACTGATGCCGAATATTGAACGTTTTCCGAACGGCAAAAAATACGAG
CTGGATAAATACACCATGTTCCATTATCTGCGTGCCCAAGAATTTGAACATGGTAAAAGCCGTATTGC
CCTGACCAATTCAGTTAATGAAGCACTGCTGAACCCGAGCCGTGTTTATACCTTTTTTAGCAGCGATT
ACGTGAAAAAGGTGAACAAAGCAACCGAAGCAGCAATGTTTTTAGGTTGGGTTGAACAGCTGGTGTAT
GATTTCACCGATGAAACCAGCGAAGTTAGCACCACCGATAAAATTGCAGATATCACCATTATCATCCC
GTATATTGGTCCGGCACTGAATATTGGCAATATGCTGTATAAAGATGATTTCGTGGGTGCCCTGATTT
TTAGCGGTGCAGTTATTCTGCTGGAATTTATTCCGGAAATTGCCATTCCGGTTCTGGGCACCTTTGCA
CTGGTTAGCTATATTGCAAATAAAGTTCTGACCGTGCAGACCATTGATAATGCACTGAGCAAACGTAA
CGAGAAATGGGATGAAGTGTACAAATATATCGTGACCAATTGGCTGGCCAAAGTTAATACCCAGATTG
ATCTGATCCGCAAAAAAATGAAAGAAGCCCTGGAAAATCAGGCAGAAGCAACCAAAGCCATTATCAAC
TATCAGTATAACCAGTACACCGAAGAAGAGAAAAACAACATCAACTTCAACATCGATGACCTGAGCAG
CAAACTGAATGAAAGCATCAATAAGGCCATGATTAACATCAACAAATTTCTGAATCAGTGCAGCGTGA
GCTATCTGATGAATAGCATGATTCCGTATGGTGTGAAACGCCTGGAAGATTTTGATGCAAGCCTGAAA
GATGCGCTGCTGAAATATATCTATGATAATCGTGGCACCCTGATTGGCCAGGTTGATCGTCTGAAAGA
TAAAGTTAACAATACCCTGAGTACCGACATTCCGTTTCAGCTGAGCAAATATGTTGATAATCAGCGTC
TGCTGAGCACCTTTACCGAATATATCAAGAACATCATCAACACCAGCATTCTGAATCTGCGCTATGAA
AGCAATCATCTGATCGATCTGAGCCGTTATGCAAGCAAAATCAACATTGGTAGCAAAGTGAACTTCGA
CCCGATTGATAAAAACCAGATTCAGCTGTTTAATCTGGAAAGCAGCAAAATCGAAGTGATCCTGAAAA
ACGCCATTGTGTATAACAGCATGTATGAGAATTTCTCGACCAGCTTTTGGATTCGCATTCCGAAATAC
TTTAATAGCATCAGCCTGAACAACGAGTACACCATTATTAACTGCATGGAAAACAATAGCGGTTGGAA
AGTGAGCCTGAATTATGGTGAAATTATCTGGACCCTGCAGGATACCCAAGAAATCAAACAGCGTGTTG
TGTTCAAATACAGCCAGATGATTAATATCAGCGACTATATCAACCGCTGGATCTTTGTTACCATTACC
AATAATCGCCTGAATAACAGCAAGATCTATATTAACGGTCGCCTGATTGATCAGAAACCGATTAGCAA
TCTGGGCAATATTCATGCGAGCAACAACATTATGTTTAAACTGGATGGTTGCCGTGATACCCATCGTT
ATATTTGGATCAAATACTTCAACCTGTTTGATAAAGAACTGAACGAAAAAGAAATTAAAGACCTGTAC
GACAACCAGAGCAATTCCGGTATTCTGAAAGACTTTTGGGGAGATTATCTGCAGTATGACAAACCGTA
TTATATGCTGAACCTGTATGACCCGAACAAATATGTGGATGTGAACAATGTTGGTATCCGTGGCTATA
TGTATCTGAAAGGTCCGCGTGGTAGCGTTqTGACCACCAACATTTATCTGAATAGCAGCCTGTATCGC
GGTACGAAATTTATCATTAAAAAGTATGCCAGCGGCAACAAGGATAATATTGTGCGTAATAATGATCG
CGTGTACATTAACGTTGTGGTGAAGAATAAAGAATATCGCCTGGCAACCAATGCAAGCCAGGCAGGCG
TTGAAAAAATTCTGAGCGCACTGGAAATTCCGGATGTTGGTAATCTGAGCCAGGTTGTTGTTATGAAA
AGCAAAAATGATCAGGGCATCACCAACAAGTGCAAAATGAATCTGCAGGACAATAACGGCAACGATAT
TGGTTTTATTGGCTTCCACCAGTTCAACAATATTGCGAAACTGGTTGCAAGCAATTGGTATAATCGTC
AGATTGAACGTAGCAGTCGTACCCTGGGTTGTAGCTGGGAATTTATCCCTGTGGATGATGGTTGGGGT
GAACGTCCGCTGTAA
SEQ ID NO: 137
(Modified BoNT/A1 (M1144G) Nucleic Acid Sequence)
ATGCCGTTTGTGAACAAACAGTTCAACTATAAAGATCCGGTGAACGGTGTTGATATCGCCTATATCAA
AATTCCGAATGCAGGTCAGATGCAGCCGGTTAAAGCCTTTAAAATCCATAACAAAATTTGGGTGATTC
CGGAACGTGATACCTTTACCAATCCGGAAGAAGGTGATCTGAATCCGCCTCCGGAAGCAAAACAGGTT
CCGGTTAGCTATTATGATAGCACCTATCTGAGCACCGATAACGAGAAAGATAACTATCTGAAAGGTGT
GACCAAACTGTTTGAACGCATTTATAGTACCGATCTGGGTCGTATGCTGCTGACCAGCATTGTTCGTG
GTATTCCGTTTTGGGGTGGTAGCACCATTGATACCGAACTGAAAGTTATTGACACCAACTGCATTAAT
GTGATTCAGCCGGATGGTAGCTATCGTAGCGAAGAACTGAATCTGGTTATTATTGGTCCGAGCGCAGA
TATCATTCAGTTTGAATGTAAATCCTTTGGCCACGAAGTTCTGAATCTGACCCGTAATGGTTATGGTA
GTACCCAGTATATTCGTTTCAGTCCGGATTTTACCTTTGGCTTTGAAGAAAGCCTGGAAGTTGATACA
AATCCGCTGTTAGGTGCAGGTAAATTTGCAACCGATCCGGCAGTTACCCTGGCACATGAACTGATTCA
TGCCGGTCATCGTCTGTATGGTATTGCAATTAATCCGAACCGTGTGTTCAAAGTGAATACCAACGCAT
ATTATGAAATGAGCGGTCTGGAAGTGTCATTTGAAGAACTGCGTACCTTTGGTGGTCATGATGCCAAA
TTTATCGATAGCCTGCAAGAAAATGAATTTCGCCTGTACTACTATAACAAATTCAAGGATATTGCGAG
CACCCTGAATAAAGCCAAAAGCATTGTTGGCACCACCGCAAGCCTGCAGTATATGAAAAATGTGTTTA
AAGAAAAATATCTGCTGAGCGAAGATACCAGCGGTAAATTTAGCGTTGACAAACTGAAATTCGATAAA
CTGTACAAGATGCTGACCGAGATTTATACCGAAGATAACTTCGTGAAGTTTTTCAAAGTGCTGAACCG
CAAAACCTACCTGAACTTTGATAAAGCCGTGTTCAAAATCAACATCGTGCCGAAAGTGAACTATACCA
TCTATGATGGTTTTAACCTGCGCAATACCAATCTGGCAGCAAACTTTAATGGTCAGAACACCGAAATC
AACAACATGAACTTTACCAAACTGAAGAACTTCACCGGTCTGTTCGAATTTTACAAACTGCTGTGTGT
TCGTGGCATTATTACCtcCAAAACCAAAAGCCTGGATAAAGGTTATAACAAAGCCCTGAATGACCTGT
GCATTAAAGTGAATAATTGGGACCTGTTTTTTAGCCCGAGCGAAGATAACTTTACCAACGATCTGAAT
AAAGGCGAAGAAATTACCAGCGATACCAATATTGAAGCAGCCGAAGAAAACATTAGCCTGGATCTGAT
TCAGCAGTATTATCTGACCTTCAACTTTGATAACGAGCCGGAAAATATCAGCATTGAAAATCTGAGCA
GCGATATTATTGGTCAGCTGGAACTGATGCCGAATATTGAACGTTTTCCGAACGGCAAAAAATACGAG
CTGGATAAATACACCATGTTCCATTATCTGCGTGCCCAAGAATTTGAACATGGTAAAAGCCGTATTGC
CCTGACCAATTCAGTTAATGAAGCACTGCTGAACCCGAGCCGTGTTTATACCTTTTTTAGCAGCGATT
ACGTGAAAAAGGTGAACAAAGCAACCGAAGCAGCAATGTTTTTAGGTTGGGTTGAACAGCTGGTGTAT
GATTTCACCGATGAAACCAGCGAAGTTAGCACCACCGATAAAATTGCAGATATCACCATTATCATCCC
GTATATTGGTCCGGCACTGAATATTGGCAATATGCTGTATAAAGATGATTTCGTGGGTGCCCTGATTT
TTAGCGGTGCAGTTATTCTGCTGGAATTTATTCCGGAAATTGCCATTCCGGTTCTGGGCACCTTTGCA
CTGGTTAGCTATATTGCAAATAAAGTTCTGACCGTGCAGACCATTGATAATGCACTGAGCAAACGTAA
CGAGAAATGGGATGAAGTGTACAAATATATCGTGACCAATTGGCTGGCCAAAGTTAATACCCAGATTG
ATCTGATCCGCAAAAAAATGAAAGAAGCCCTGGAAAATCAGGCAGAAGCAACCAAAGCCATTATCAAC
TATCAGTATAACCAGTACACCGAAGAAGAGAAAAACAACATCAACTTCAACATCGATGACCTGAGCAG
CAAACTGAATGAAAGCATCAATAAGGCCATGATTAACATCAACAAATTTCTGAATCAGTGCAGCGTGA
GCTATCTGATGAATAGCATGATTCCGTATGGTGTGAAACGCCTGGAAGATTTTGATGCAAGCCTGAAA
GATGCGCTGCTGAAATATATCTATGATAATCGTGGCACCCTGATTGGCCAGGTTGATCGTCTGAAAGA
TAAAGTTAACAATACCCTGAGTACCGACATTCCGTTTCAGCTGAGCAAATATGTTGATAATCAGCGTC
TGCTGAGCACCTTTACCGAATATATCAAGAACATCATCAACACCAGCATTCTGAATCTGCGCTATGAA
AGCAATCATCTGATCGATCTGAGCCGTTATGCAAGCAAAATCAACATTGGTAGCAAAGTGAACTTCGA
CCCGATTGATAAAAACCAGATTCAGCTGTTTAATCTGGAAAGCAGCAAAATCGAAGTGATCCTGAAAA
ACGCCATTGTGTATAACAGCATGTATGAGAATTTCTCGACCAGCTTTTGGATTCGCATTCCGAAATAC
TTTAATAGCATCAGCCTGAACAACGAGTACACCATTATTAACTGCATGGAAAACAATAGCGGTTGGAA
AGTGAGCCTGAATTATGGTGAAATTATCTGGACCCTGCAGGATACCCAAGAAATCAAACAGCGTGTTG
TGTTCAAATACAGCCAGATGATTAATATCAGCGACTATATCAACCGCTGGATCTTTGTTACCATTACC
AATAATCGCCTGAATAACAGCAAGATCTATATTAACGGTCGCCTGATTGATCAGAAACCGATTAGCAA
TCTGGGCAATATTCATGCGAGCAACAACATTATGTTTAAACTGGATGGTTGCCGTGATACCCATCGTT
ATATTTGGATCAAATACTTCAACCTGTTTGATAAAGAACTGAACGAAAAAGAAATTAAAGACCTGTAC
GACAACCAGAGCAATTCCGGTATTCTGAAAGACTTTTGGGGAGATTATCTGCAGTATGACAAACCGTA
TTATATGCTGAACCTGTATGACCCGAACAAATATGTGGATGTGAACAATGTTGGTATCCGTGGCTATA
TGTATCTGAAAGGTCCGCGTGGTAGCGTTggtACCACCAACATTTATCTGAATAGCAGCCTGTATCGC
GGTACGAAATTTATCATTAAAAAGTATGCCAGCGGCAACAAGGATAATATTGTGCGTAATAATGATCG
CGTGTACATTAACGTTGTGGTGAAGAATAAAGAATATCGCCTGGCAACCAATGCAAGCCAGGCAGGCG
TTGAAAAAATTCTGAGCGCACTGGAAATTCCGGATGTTGGTAATCTGAGCCAGGTTGTTGTTATGAAA
AGCAAAAATGATCAGGGCATCACCAACAAGTGCAAAATGAATCTGCAGGACAATAACGGCAACGATAT
TGGTTTTATTGGCTTCCACCAGTTCAACAATATTGCGAAACTGGTTGCAAGCAATTGGTATAATCGTC
AGATTGAACGTAGCAGTCGTACCCTGGGTTGTAGCTGGGAATTTATCCCTGTGGATGATGGTTGGGGT
GAACGTCCGCTGTAA
SEQ ID NO: 138
(Modified BoNT/A1 (M1144L) Nucleic Acid Sequence)
ATGCCGTTTGTGAACAAACAGTTCAACTATAAAGATCCGGTGAACGGTGTTGATATCGCCTATATCAA
AATTCCGAATGCAGGTCAGATGCAGCCGGTTAAAGCCTTTAAAATCCATAACAAAATTTGGGTGATTC
CGGAACGTGATACCTTTACCAATCCGGAAGAAGGTGATCTGAATCCGCCTCCGGAAGCAAAACAGGTT
CCGGTTAGCTATTATGATAGCACCTATCTGAGCACCGATAACGAGAAAGATAACTATCTGAAAGGTGT
GACCAAACTGTTTGAACGCATTTATAGTACCGATCTGGGTCGTATGCTGCTGACCAGCATTGTTCGTG
GTATTCCGTTTTGGGGTGGTAGCACCATTGATACCGAACTGAAAGTTATTGACACCAACTGCATTAAT
GTGATTCAGCCGGATGGTAGCTATCGTAGCGAAGAACTGAATCTGGTTATTATTGGTCCGAGCGCAGA
TATCATTCAGTTTGAATGTAAATCCTTTGGCCACGAAGTTCTGAATCTGACCCGTAATGGTTATGGTA
GTACCCAGTATATTCGTTTCAGTCCGGATTTTACCTTTGGCTTTGAAGAAAGCCTGGAAGTTGATACA
AATCCGCTGTTAGGTGCAGGTAAATTTGCAACCGATCCGGCAGTTACCCTGGCACATGAACTGATTCA
TGCCGGTCATCGTCTGTATGGTATTGCAATTAATCCGAACCGTGTGTTCAAAGTGAATACCAACGCAT
ATTATGAAATGAGCGGTCTGGAAGTGTCATTTGAAGAACTGCGTACCTTTGGTGGTCATGATGCCAAA
TTTATCGATAGCCTGCAAGAAAATGAATTTCGCCTGTACTACTATAACAAATTCAAGGATATTGCGAG
CACCCTGAATAAAGCCAAAAGCATTGTTGGCACCACCGCAAGCCTGCAGTATATGAAAAATGTGTTTA
AAGAAAAATATCTGCTGAGCGAAGATACCAGCGGTAAATTTAGCGTTGACAAACTGAAATTCGATAAA
CTGTACAAGATGCTGACCGAGATTTATACCGAAGATAACTTCGTGAAGTTTTTCAAAGTGCTGAACCG
CAAAACCTACCTGAACTTTGATAAAGCCGTGTTCAAAATCAACATCGTGCCGAAAGTGAACTATACCA
TCTATGATGGTTTTAACCTGCGCAATACCAATCTGGCAGCAAACTTTAATGGTCAGAACACCGAAATC
AACAACATGAACTTTACCAAACTGAAGAACTTCACCGGTCTGTTCGAATTTTACAAACTGCTGTGTGT
TCGTGGCATTATTACCtCCAAAACCAAAAGCCTGGATAAAGGTTATAACAAAGCCCTGAATGACCTGT
GCATTAAAGTGAATAATTGGGACCTGTTTTTTAGCCCGAGCGAAGATAACTTTACCAACGATCTGAAT
AAAGGCGAAGAAATTACCAGCGATACCAATATTGAAGCAGCCGAAGAAAACATTAGCCTGGATCTGAT
TCAGCAGTATTATCTGACCTTCAACTTTGATAACGAGCCGGAAAATATCAGCATTGAAAATCTGAGCA
GCGATATTATTGGTCAGCTGGAACTGATGCCGAATATTGAACGTTTTCCGAACGGCAAAAAATACGAG
CTGGATAAATACACCATGTTCCATTATCTGCGTGCCCAAGAATTTGAACATGGTAAAAGCCGTATTGC
CCTGACCAATTCAGTTAATGAAGCACTGCTGAACCCGAGCCGTGTTTATACCTTTTTTAGCAGCGATT
ACGTGAAAAAGGTGAACAAAGCAACCGAAGCAGCAATGTTTTTAGGTTGGGTTGAACAGCTGGTGTAT
GATTTCACCGATGAAACCAGCGAAGTTAGCACCACCGATAAAATTGCAGATATCACCATTATCATCCC
GTATATTGGTCCGGCACTGAATATTGGCAATATGCTGTATAAAGATGATTTCGTGGGTGCCCTGATTT
TTAGCGGTGCAGTTATTCTGCTGGAATTTATTCCGGAAATTGCCATTCCGGTTCTGGGCACCTTTGCA
CTGGTTAGCTATATTGCAAATAAAGTTCTGACCGTGCAGACCATTGATAATGCACTGAGCAAACGTAA
CGAGAAATGGGATGAAGTGTACAAATATATCGTGACCAATTGGCTGGCCAAAGTTAATACCCAGATTG
ATCTGATCCGCAAAAAAATGAAAGAAGCCCTGGAAAATCAGGCAGAAGCAACCAAAGCCATTATCAAC
TATCAGTATAACCAGTACACCGAAGAAGAGAAAAACAACATCAACTTCAACATCGATGACCTGAGCAG
CAAACTGAATGAAAGCATCAATAAGGCCATGATTAACATCAACAAATTTCTGAATCAGTGCAGCGTGA
GCTATCTGATGAATAGCATGATTCCGTATGGTGTGAAACGCCTGGAAGATTTTGATGCAAGCCTGAAA
GATGCGCTGCTGAAATATATCTATGATAATCGTGGCACCCTGATTGGCCAGGTTGATCGTCTGAAAGA
TAAAGTTAACAATACCCTGAGTACCGACATTCCGTTTCAGCTGAGCAAATATGTTGATAATCAGCGTC
TGCTGAGCACCTTTACCGAATATATCAAGAACATCATCAACACCAGCATTCTGAATCTGCGCTATGAA
AGCAATCATCTGATCGATCTGAGCCGTTATGCAAGCAAAATCAACATTGGTAGCAAAGTGAACTTCGA
CCCGATTGATAAAAACCAGATTCAGCTGTTTAATCTGGAAAGCAGCAAAATCGAAGTGATCCTGAAAA
ACGCCATTGTGTATAACAGCATGTATGAGAATTTCTCGACCAGCTTTTGGATTCGCATTCCGAAATAC
TTTAATAGCATCAGCCTGAACAACGAGTACACCATTATTAACTGCATGGAAAACAATAGCGGTTGGAA
AGTGAGCCTGAATTATGGTGAAATTATCTGGACCCTGCAGGATACCCAAGAAATCAAACAGCGTGTTG
TGTTCAAATACAGCCAGATGATTAATATCAGCGACTATATCAACCGCTGGATCTTTGTTACCATTACC
AATAATCGCCTGAATAACAGCAAGATCTATATTAACGGTCGCCTGATTGATCAGAAACCGATTAGCAA
TCTGGGCAATATTCATGCGAGCAACAACATTATGTTTAAACTGGATGGTTGCCGTGATACCCATCGTT
ATATTTGGATCAAATACTTCAACCTGTTTGATAAAGAACTGAACGAAAAAGAAATTAAAGACCTGTAC
GACAACCAGAGCAATTCCGGTATTCTGAAAGACTTTTGGGGAGATTATCTGCAGTATGACAAACCGTA
TTATATGCTGAACCTGTATGACCCGAACAAATATGTGGATGTGAACAATGTTGGTATCCGTGGCTATA
TGTATCTGAAAGGTCCGCGTGGTAGCGTTcTGACCACCAACATTTATCTGAATAGCAGCCTGTATCGC
GGTACGAAATTTATCATTAAAAAGTATGCCAGCGGCAACAAGGATAATATTGTGCGTAATAATGATCG
CGTGTACATTAACGTTGTGGTGAAGAATAAAGAATATCGCCTGGCAACCAATGCAAGCCAGGCAGGCG
TTGAAAAAATTCTGAGCGCACTGGAAATTCCGGATGTTGGTAATCTGAGCCAGGTTGTTGTTATGAAA
AGCAAAAATGATCAGGGCATCACCAACAAGTGCAAAATGAATCTGCAGGACAATAACGGCAACGATAT
TGGTTTTATTGGCTTCCACCAGTTCAACAATATTGCGAAACTGGTTGCAAGCAATTGGTATAATCGTC
AGATTGAACGTAGCAGTCGTACCCTGGGTTGTAGCTGGGAATTTATCCCTGTGGATGATGGTTGGGGT
GAACGTCCGCTGTAA
SEQ ID NO: 139
(Polypeptide Sequence of BoNT/A2 - UniProt D3IV23)
MPFVNKQFNYKDPVNGVDIAYIKIPNAGQMQPVKAFKIHNKIWVIPERDTFTNPEEGDLN
PPPEAKQVPVSYYDSTYLSTDNEKDNYLKGVTKLFERIYSTDLGRMLLTSIVRGIPFWGG
STIDTELKVIDTNCINVIQPDGSYRSEELNLVIIGPSADIIQFECKSFGHDVLNLTRNGY
GSTQYIRFSPDFTFGFEESLEVDTNPLLGAGKFATDPAVTLAHELIHAEHRLYGIAINPN
RVFKVNTNAYYEMSGLEVSFEELRTFGGHDAKFIDSLQENEFRLYYYNKFKDVASTLNKA
KSIIGTTASLQYMKNVFKEKYLLSEDTSGKFSVDKLKFDKLYKMLTEIYTEDNFVNFFKV
INRKTYLNFDKAVFRINIVPDENYTIKDGFNLKGANLSTNFNGQNTEINSRNFTRLKNFT
GLFEFYKLLCVRGIIPFKTKSLDEGYNKALNDLCIKVNNWDLFFSPSEDNFTNDLDKVEE
ITADTNIEAAEENISLDLIQQYYLTFDFDNEPENISIENLSSDIIGQLEPMPNIERFPNG
KKYELDKYTMFHYLRAQEFEHGDSRIILTNSAEEALLKPNVAYTFFSSKYVKKINKAVEA
FMFLNWAEELVYDFTDETNEVTTMDKIADITIIVPYIGPALNIGNMLSKGEFVEAIIFTG
VVAMLEFIPEYALPVFGTFAIVSYIANKVLTVQTINNALSKRNEKWDEVYKYTVTNWLAK
VNTQIDLIREKMKKALENQAEATKAIINYQYNQYTEEEKNNINFNIDDLSSKLNESINSA
MININKFLDQCSVSYLMNSMIPYAVKRLKDFDASVRDVLLKYIYDNRGTLILQVDRLKAE
VNNTLSTDIPFQLSKYVENKKLLSTFTEYIKNITNTSILSIVVDKDDELIDLSRYGAEIY
RGDKVFYNSIDKNQIKLINLESSTIEVILKNAIVYNSMYENFSTSFWIKIPKYFSKINLN
NEYTIINCIENNSGWKVSLNYGEIIWTLQDNKQNIQRVVFKYSQMVNISDYINRWIFVTI
TNNRLTKSKIYINGRLIDQKLISNLGNIHASNKIMFKLDGCRDPGRYIVIKYFNLFDKEL
NEKEIKDLYDSQSNSGILKDFWGDYLQYDKPYYMLNLYDPNKYVDVNNIGIRGYMYLKGP
RGSVVTTNIYLNSTLYMGTKFIIKKYASGNEDNIVRNNDRVYINVVVKNKEYRLATNASQ
AGVEKILSALEIPDVGNLSQLVVMKSKDDQGIRNKCKMNLQDNNGNDIGLIGFHQFNNIA
KLVASNWYNRQVGKASRTFGCSWEFIPVDDGWGESSQ
SEQ ID NO: 140
(Polypeptide Sequence of BoNT/A5 v.1 - UniProt C7BEA8)
MPFVNKQFNYKDPVNGVDIAYIKIPNAGQMQPVKAFKIHNKIWVIPERDTFTNPEEGDLN
PPPEAKQVPVSYYDSTYLSTDNEKDNYLKGVTKLFERIYSTELGRMLLTSIVRGIPFWGG
STIDTELKVIDTNCINVIQPDGSYRSEELNLVIIGPSADIIQFECKSFGHDVLNLTRNGY
GSTQYIRFSPDFTFGFEESLEVDTNPLLGAGKFATDPAVTLAHELIHAGHRLYGIAINPN
RVFKVNTNAYYEMSGLEVSFEELRTFGEHDAKFIDSLQENEFRLYYYNKFKDIASTLNKA
KSIVGTTASLQYMKNVFKEKYLLSEDTSGKFSVDKLKFDKLYKMLTEIYTEDNFVKFFKV
LNRKTYLNFDKAVFKINIVPEVNYTIYDGFNLRNTNLAANFNGQNTEINNMNFTKLKNFT
GLFEFYKLLCVRGIITSKTKSLDEGYNKALNDLCIKVNNWDLFFSPSEDNFTNDLNKGEE
ITSDTNIEAAEENISLDLIQQYYLTFNFDNEPENISIENLSSDIIGQLELMPNIERFPNG
KKYELDKYTMFHYLRAQEFEHGKSRIVLTNSVNEALLNPSSVYTFFSSDYVRKVNKATEA
AMFLGWVEQLVYDFTDETSEVSTTDKIADITIIIPYIGPALNIGNMLYKDDFVGALIFSG
AVILLEFIPEIAIPVLGTFALVSYIANKVLTVQTIDNALSKRNEKWGEVYKYIVTNWLAK
VNTQIDLIRKKMKEALENQAEATKAIINYQYNQYTEEEKNNINFNIGDLSSKLNDSINKA
MININKFLNQCSVSYLMNSMIPYGVKRLEDFDASLKDALLKYIYDNRGTLIGQVDRLKDK
VNNTLSTDIPFQLSKYVDNQRLLSTFTEYIKNIINTSILNLRYESNHLIDLSRYASEINI
GSKVNFDPIDKNQIQLFNLESSKIEIILKNAIVYNSMYENFSTSFWIKIPKYFSKINLNN
EYTIINCIENNSGWKVSLNYGEIIWTLQDNKQNIQRVVFKYSQMVAISDYINRWIFITIT
NNRLNNSKIYINGRLIDQKPISNLGNIHASNNIMFKLDGCRDPQRYIWIKYFNLFDKELN
EKEIKDLYDNQSNSGILKDFWGNYLQYDKPYYMLNLYDPNKYVDVNNVGIRGYMYLKGPR
GSIVTTNIYLNSSLYMGTKFIIKKYASGNKDNIVRNNDRVYINVVVKNKEYRLATNASQA
GVEKILSVLEIPDVGNLSQVVVMKSKNDQGIRNKCKMNLQDNNGNDIGFIGFHQFNNIDK
LVASNWYNRQIERSSRTFGCSWEFIPVDDGWGESPL
SEQ ID NO: 141
(Polypeptide Sequence of BoNT/A5 v.2 - UniProt C1IPK2)
MLFVNKQFNYKDPVNGVDIAYIKIPNAGQMQPVKAFKIHNKIWVIPERDTFTNPEEGDLN
PPPEAKQVPVSYYDSTYLSTDNEKDNYLKGVTKLFERIYSTELGRMLLTSIVRGIPFWGG
STIDTELKVIDTNCINVIQPDGSYRSEELNLVIIGPSADIIQFECKSFGHDVLNLTRNGY
GSTQYIRFSPDFTFGFEESLEVDTNPLLGAGKFATDPAVTLAHELIHAGHRLYGIAINPN
RVFKVNTNAYYEMSGLEVSFEELRTFGEHDAKFIDSLQENEFRLYYYNKFKDIASTLNKA
KSIVGTTASLQYMKNVFKEKYLLSEDTSGKFSVDKLKFDKLYKMLTEIYTEDNFVKFFKV
LNRKTYLNFDKAVFKINIVPEVNYTIYDGFNLRNTNLAANFNGQNTEINNMNFTKLKNFT
GLFEFYKLLCVRGIITSKTKSLDEGYNKALNDLCIKVNNWDLFFSPSEDNFTNDLNKGEE
ITSDTNIEAAEENISLDLIQQYYLTFNFDNEPENISIENLSSDIIGQLELMPNIERFPNG
KKYELDKYTMFHYLRAQEFEHGKSRIVLINSVNEALLNPSSVYTFFSSDYVRKVNKATEA
AMFLGWVEQLVYDFTDETSEVSTTDKIADITIIIPYIGPALNIGNMLYKDDFVGALIFSG
AVILLEFIPEIAIPVLGTFALVSYIANKVLTVQTIDNALSKRNEKWGEVYKYIVTNWLAK
VNTQIDLIRKKMKEALENQAEATKAIINYQYNQYTEEEKNNINFNIGDLSSKLNDSINKA
MININKFLNQCSVSYLMNSMIPYGVKRLEDFDASLKDALLKYIYDNRGTLIGQVDRLKDK
VNNTLSTDIPFQLSKYVDNQRLLSTFTEYIKNIINTSILNLRYESNHLIDLSRYASEINI
GSKVNFDPIDKNQIQLFNLESSKIEIILKNAIVYNSMYENFSTSFWIKIPKYFSKINLNN
EYTIINCIENNSGWKVSLNYGEIIWTLQDNKQNIQRVVFKYSQMVAISDYINRWIFITIT
NNRLNNSKIYINGRLIDQKPISNLGNIHASNNIMFKLDGCRDPHRYIWIKYFNLFDKELN
EKEIKDLYDNQSNSGILKDFWGNYLQYDKPYYMLNLYDPNKYVDVNNVGIRGYMYLKGPR
GSIVTTNIYLNSSLYMGTKFIIKKYASGNKDNIVRNNDRVYINVVVKNKEYRLATNASQA
GVEKILSVLEIPDVGNLSQVVVMKSKNDQGIRNKCKMNLQDNNGNDIGFIGFHQFNNIDK
LVASNWYNRQIERSSRTFGCSWEFIPVDDGWGESPL
SEQ ID NO: 142
(Polypeptide Sequence of BoNT/A6 - ACW83608.1, Accession # FJ981696)
MPFVNKQFNYKDPVNGVDIAYIKIPNAGQMQPVKAFKIHNKIWVIPERDTFTNPEEGDLNPPPEAKQVPV
SYYDSTYLSTDNEKDNYLKGVTKLFERIYSTDLGRMLLTSIVRGIPFWGGSTIDTELKVIDTNCINVIQP
DGSYRSEELNLVIIGPSADIIQFECKSFGHEVLNLTRNGYGSTQYIRFSPDFTFGFEESLEVDTNPLLGA
GKFATDPAVTLAHELIHAGHRLYGIAINPNRVFKVNTNAYYEMSGLEVSFEELRTFGGHDAKFIDSLQEN
EFRLYYYNKFKDIASTLNKAKSIVGTTASLQYMKNVFKEKYLLSEDTSGKFSVDKLKFDKLYKMLTEIYT
EDNFVKFFKVLNRKTYLNFDKAVFKINIVPKVNYTIYDGFNLRNTNLAANFNGQNTEINNMNFAKLKNFT
GLFEFYKLLCVRGIITSKTKSLDKGYNKALNDLCIKVNNWDLFFSPSEDNFTNDLNKGEEITSDTNIEAA
EENISLDLIQQYYLTFNFDNEPENISIENLSSDIIGQLELMPNIERFPNGKKYELDKYTMFHYLSAQEFE
HGKSRIDLTNSVNEALLNPSHVYTFFSSDYVKKVNKATEAAMFLGWVEQLVYDFTDETSEVSTTDKIADI
TIIIPYIGPALNIGNMLYKDDFVGALIFSGAVILLEFIPEIAIPVLGTFAIVSYIANKVLTVQTINNALS
KRNEKWDEVYKYTVTNWLAKVNTQIDLIREKMKKALENQAEATKAIINYQYNQYTEEEKNNINFNIDDLS
SKLNESINSAMININKFLDQCSVSYLMNSMIPYAVKRLKDFDASVRDVLLKYIYDNRGTLIGQVDRLKDK
VNNTLSTDIPFQLSKYVDNQRLLSTFTEYIKNIINTSILSLRYENNHLIDLSRYASKINIGSRVNFDPID
KNQIQLFNLESSKIEVILKNAIVYNSMYENFSTSFWIKIPKYFSEISLNNEYTIINCIENNSGWKVSLNY
GEIIWTLQDNKQNIQRVVFKYSQMVAISDYINRWIFITITNNRLTKSKIYINGRLIDQKPISNLGNIHAS
NKIMFKLDGCRDPRRYIMIKYFNLFDKELNEKEIKDLYDSQSNSGILKDFWGNYLQYDKPYYMLNLFDPN
KYVDVNNVGIRGYMYLKGSRSTLLTTNIYLNSGLYMGTKFIIKKYASGNKDNIVRNNDRVYINVVVNNKE
YRLATNASQAGVEKILSALEIPDIGNLSQVVVMKSKNDQGIRNKCKMNLQDNNGNDIGFIGFHKFNDIYK
LVASNWYNRQIEISSRTFGCSWEFIPVDDGWGEKPL
SEQ ID NO: 143
(Polypeptide Sequence of BoNT/A7 - GenBank: AFV13854.1, Accession#
JQ954969.1)
MPFVNKQFNYKDPVNGVDIAYIKIPNAGQMQPVKAFKIHNKIWVIPERDIFTNPEEGDLNPPPEAKQVPV
SYYDSTYLSTDNEKDNYLKGVTKLFERIYSTDLGRMLLTSIVRGIPFWGGSTIDTELKVIDTNCINVIQP
DGSYRSEELNLVIIGPSADIINFECKSFGHDVLNLTRNGYGSTQYIRFSPDFTFGFEESLEVDTNPLLGA
GKFAIDPAVTLAHELIHAGHRLYGIAINPNRVFKVNTNAYYEMSGLEVSFEELRTFGGHDAKFIDSLQEN
EFRLYYYNKFKEVASILNKAKSIIGTTASLQYMKNVFKEKYLLSEDTSGKFSVDKLRFDKLYKMLTEIYT
EDNFVKFFKVLNRKTYLNFDKAVFKMNIVPEVNYTIYDGFNLRNTNLAANFNGQNTEINNMNFTKLKNFT
GLFEFYKLLCVRGIITSKTKSLDEGYNKALNDLCIKVNNWDLFFSPSEDNFTNDLNKGEEITSDTNIEAA
EENISSDLIQQYYLTFNFDNEPENISIENLSSDIIGQLELMPNIERFPNGKKYELDKYTMFHYLRAQEFE
YGNSRIVLINSVNEALLNPSSVYTFFSSDYVKKANEATEAAMFLGWVEQLVYDFTDETSEVSTMDKIADI
TIIVPYIGPALNIGNMVYKKKFEEALIFSGAVILLEFVPEIVLPILGTFALVSYTSNKVLTVRTIDNALS
KRNEKWEEVYKYIVTNWLAKVNTQINLIRKKMKEALENQAEATKAIINYQYNQYTEEEKNNINFNIGDLS
SKLNDSINKAMININKFLDQCSVSYLMNSMIPQGVKQLKDFDTSLRDSLLKYIYDNRGTLIGQVDRLKDK
VNNTLSTDIPFQLSKYADNQRLLSTFTEYIKNIINTSILNLRYESNHLIDLSRYASKINIGSRVNFDPID
KNQIQLFNLESSKIEVILKNAIVYNSMYENFSTSFWIKIPKYFSKINLNNEYTIINCIENNSGWKVSLNY
GEIIWTLQDNEQNIQRVVFKYSQMVNISDYINRWIFVTITNNRLTKSKIYINGRLIDQKPISNLGNIHAS
NKIMFKLDGCRDPHRYILIKYFNLFDKELNEKEIKDLYDNQSNSGILKDFWGDYLQYDKPYYMLNLYDPN
KYIDVNNIGIRGYMYLKGPRGSVTTTNIYLNSMLYMGTKFIIKKHASGNKDNIVRNNDRVYINVLVKNKE
YRLATNASQAGGEKILSAVEIPDVGNLSQVVVMKSKNDQGIRNKCKMNLQDNNGNDIGFIGFHQFNNIAK
LVASNWYNRQIGKTSVTLGCSWELIPVDYGWGESSL
SEQ ID NO: 144
(Polypeptide Sequence of BoNT/A8 - GenBank: AJA05787.1, Accession#
KM233166)
MPFVNKQFNYKDTVNGIDIAYIKIPNAGQMQPVKAFKIHNKIWVIPERDTFTNPKEGDLNPPPEAKQVPV
SYYDSTYLSTDNEKDNYLKGVTKLFERIYSTDLGRMLLTSIVRGIPFWGGSTIDTELKVIDTNCINVIQP
DGSYRSEELNLVIIGPSADIIQFECKSFGHDVLNLTRNGYGSTQYIRFSPDFTFGFEESLEVDTNPLLGA
GKFATDPAVTLAHELIHAEHRLYGIAINPNRVFKVNTNAYYEMSGLEVSFEELRTFGGHNAKFIDSLQEN
EFRLYYYNKFKDIASTLNKAKSIVGTTASLQYMKNVFKEKYLLSEDTSGKFSVDKLKFDKLYKMLTEIYT
EDNFVKFFKVLNRKTYLNFDKAVFKINIVPDENYTIKDGFNLKNTNLAANFNGQNTEINSRNFTKLKNFT
GLFEFYKLLCVRGIIPFKTKSLDEGYNKALNDLCIKVNNWDLFFSPSEDNFTNDLDKVEEITSDTNIEAA
EENISLDLIQQYYLTFDFDNEPENISIENLSSDIIGQLEPMPNIERFPNGKKYELDKYTMFHYLRAQEFE
HSKSRIALTNSVNEALLNPSRVYTFFSSDYVKKVNKATEAAMFLGWVEQLVYDFTDETSEVSTTDKIADI
TIIIPYIGPALNIGNMLYKDDFVGALIFSGAVILLEFIPEIAIPVLGTFALVSYIANKVLTVQTIDNALS
KRNEKWDEVYKYIVTNWLAKVNTQIDLVRKKMKEALENQAEATKAIINYQYNQYTEEEKNNINFNIDDLS
SKLNESINSAMTNINKFLDQCSVSYLMNSMIPYAVKRLKDFDASVREVLLKYIYDNRGTLILQVDRLKDK
VNNTLSADIPFQLSKYVDNKKLLSTFTEYIKNITNTSILSIVVDKDGRLIDLSRYGAEIYNGDKVSYNSI
DKNQIKLINLESSAIEVILKNAIVYNSMYENFSTSFWIKIPKYFSKINLNNEYTIINCIENNSGWKVSLN
YGEIIWTLQDNQQNIQRVVFKYSQMVNISDYINRWIFVTITNNRLDKSKIYINGRLIDQKPISNLGNIHA
SNNIMFKLDGCRDPRRYIVIKYFNLFDKELNEKEIKDLYDNQSNSGILKDFWGDYLQYDKPYYMLNLYDP
NKYVDVNNIGIRGYMYLKGPRGSVVTTNIYLNSTLYMGTKFIIKKYASGNKDNIVRNNDRVYINVVVKNK
EYRLATNALQAGVEKILSALEIPDVGNLSQVVVMKSKNDQGIRNKCKMNLQDNNGNDIGLIGFHQFNNIA
KLVASNWYNRQVGKASRTFGCSWEFIPVDDGWGESSQ

### EXAMPLES

### Materials & Methods

### Forced Oxidation Study

[0521] BoNT molecules were subjected to forced oxidation by exchanging the buffering solution using 0.5 mL Amicon spin columns. The buffer used to oxidise was 0.001% Hydrogen Peroxide in 20 mM Citrate buffer pH 5.0. Following buffer exchange samples were incubated in the dark for the desired period up to 72 hours before the oxidation reaction was quenched by the addition of excess methionine. LC MS peptide mapping was used to calculate oxidation of the molecules tested. Samples were denatured by the addition of 1M Urea in 100 mM Tris pH 7.6 before being reduced and alkylated by the addition of DTT and Iodoacetamide respectively, they were then incubated in the dark for 30 minutes. Samples were then buffer exchanged into 1M Urea in 100 mM Tris pH 7.6 using 0.5 mL Amicon spin columns for digestion. Trypsin was added and the samples were incubated at 37° C. for 4 hours to digest the protein. LC MS was carried out on a Waters SYNAPT G2-Si (Tof) mass spectrometer coupled to an acquity H-Class Bio UPLC. Aliquots of 10 microliters were injected onto an Acquity BEH C18 column 130 Å, 1.7 μm, 2.1×150 mm and analysed by a 93 minute UPLC gradient at a flow rate of 0.2 ml/min. The UPLC gradient is shown in the table below, mobile phase A was composed of 0.02% TFA in water and mobile phase B was composed of 0.02% TFA in acetonitrile.

| Time | % A | % B |
|---|---|---|
| Initial | 100 | 0 |
| 2 | 100 | 0 |
| 5 | 95 | 5 |
| 29 | 80 | 20 |
| 34.5 | 79 | 21 |
| 38.5 | 76 | 24 |
| 73.5 | 65 | 35 |
| 77.5 | 10 | 90 |
| 78.5 | 5 | 95 |
| 80 | 95 | 5 |
| 82 | 5 | 95 |
| 83 | 100 | 0 |
| 93 | 100 | 0 |

[0522] Data were acquired using an MS^{E} method comprised of a low energy and a high collision energy scan run on UNIFI software.

### Cell-Based Activity Assay

[0523] The cell-based activity assay uses an engineered neuronal rodent clonal cell line. Addition of toxins leads to internalisation via receptor binding, translocation and proteolytic cleavage of the toxin target. The cell line expresses full-length SNAP-25 (natural proteolytic target of BoNT/A), the cleavage of which is measured in the assay. The potency of toxin samples was determined relative to a Reference Standard by a parallel curve test, and by comparing the EC₅₀ of Test Samples with the EC₅₀ of the Reference Standard. On day one cells were dispensed into inner wells of 3 tissue culture plates and allowed to settle for 15-25 minutes then incubated at 37° C. with 5% CO₂ for 1 to 1.5 hours. Media was then changed from growth media to assay media and cells were incubated overnight at 37° C. with 5% CO₂. On day two, samples for investigation were diluted in assay media and added to wells at the desired concentration, the plates were then incubated at 37° C. with 5% CO₂ for 72 hours. On day five the fluorescence was measured using the Tecan INFINITE M1000 PRO plate reader.

### Computer Modelling

[0524] Computational analysis to prioritise M1144 substitutions was performed on the BoNT/A crystal structure (3BTA.pdb) using Molecular Operating Environment visualisation software (MOE—Chemical Computing Group ULC). Average structure properties for mutants were evaluated from ensembles generated by the residue scan module. Variation to surface area and hydrophilic/hydrophobic patches and the predicted impact on the 3D confirmation and intramolecular interactions compared to the wild type molecule were assessed. Mutations were prioritised that minimised disruption to the protein structure and the interaction network of the wild-type M1144.

### Mutation of BoNT/A

[0525] Mutation of the BoNT/A gene sequence (codon optimised for expression in E. coli) was performed by site directed mutagenesis of the M1144 codon in the expression vector using the Q5 kit from NEB (E0554S). Primers were designed to change the ATG (Methionine) codon to GTG (Valine) or CTG (Leucine) using the NEBase Changer software. The plasmid was amplified by PCR using the resulting primers. The resulting DNA was then treated with a Kinase/Ligase/DpnI mixture to ligate the amplified DNA and digest the plasmid DNA template. The reaction mixture was then mixed with chemically competent E. coli and transformed using heat shock at 42° C. Transformants were selected using antibiotic selection on LB agar plates. Colonies were picked to inoculate overnight cultures. The cultures were harvested by centrifugation and plasmid DNA was prepared for sequencing analysis using a Wizard Plus SV Miniprep Kit (Promega). Mutations were confirmed by Sanger Sequencing. All plasmids used contained a promoter region for the gene of interest under the control of the lac operator and as such expression was inducible by the addition of IPTG.

### Expression, Activation, and Purification of Modified BoNT/A

[0526] Expression was initiated with a 100 mL culture inoculated from the selected cell bank and grown overnight at 37° C. in the presence of the selection antibiotic using modified terrific broth. The overnight culture was then used to inoculate the 1 L main culture that was then incubated at 37° C. until an OD_{600 nm} of 0.5-1.0 AU. When the desired OD_{600 nm} was reached the temperature was dropped to 16° C. for 1 hr. Following the temperature drop expression was induced using 1 mM IPTG and the culture was grown for 20 hrs before harvesting by centrifugation.

[0527] Cells were resuspended in 3 mL/g wet cell weight in 50 mM Tris pH 8.0, 200 mM NaCl and lysed by sonication (Misonix 3000 sonicator) on ice. The sample was conditioned to load the capture column by the addition of ammonium sulphate (NH₄)₂SO₄ and was then clarified by centrifugation prior to the chromatography step. Target protein was captured using Hydrophobic Interaction Chromatography (HIC) and was eluted over an ammonium sulphate gradient (1M-0M (NH₄)₂SO₄). Fractions were analysed by SDS-PAGE and those containing BoNT were pooled and conditioned for intermediate purification using Anion Exchange Chromatography (AIEX). The conditioned sample was loaded to the Ion exchange column and eluted over an increasing sodium chloride (NaCl) gradient from 25 mM to 1 M. Fractions containing BoNT were pooled following SDS-PAGE analysis and activated using Lys-C. 0.5 pg Lys-C per mg of total protein was added and activation was performed at 2-8° C. for 18 hours. The sample was then conditioned by the addition of NaCl before a final polishing chromatography step using HIC. Protein was eluted over a decreasing NaCl gradient (3 M-0M). Fractions containing activated BoNT were pooled and concentrated to 0.5-1.0 mg/mL and buffer exchanged by size exclusion chromatography into PBS pH 7.2 prior to storage at −80° C.

### Example 1

### Oxidation of Botulinum Neurotoxin A (BoNT/A)

[0528] Botulinum neurotoxin A (BoNT/A) was subjected to forced oxidation via exposure to the oxidising agent hydrogen peroxide, as described above. Mass spectrometry was then utilized to assess the level of oxidation of peptides within the BoNT/A molecule and specific sites of oxidation identified/assessed due to a change in mass. Based on the analysis, a number of oxidised BoNT/A peptides were identified.

[0529] The oxidised BoNT/A was also tested in a cell-based activity assay as described above. It was found that there was a correlation between the number of peptides oxidised at a methionine residue corresponding to position 1144 (M1144) of BoNT/A (FIG. 1 and FIG. 2, “Oxidation”) and activity (FIG. 1 and FIG. 2, “Activity”). In other words, oxidation at M1144 was found to be a principal cause of oxidation-dependent loss of BoNT/A activity.

[0530] M1144 is an amino acid present in the C-terminal portion of the He domain of BoNT/A (Hec domain) at a SV2c target binding region.

### Example 2

### Modelling Modification of BoNT/A

[0531] Having identified M1144 as a candidate for oxidative sensitivity, a mutation was introduced at this site in an attempt to prevent oxidation at this residue. Computer modelling was performed using an existing BoNT/A crystal structure to predict and score the structural effect of various modifications.

[0532] Based on the modelling, the following substitutions were considered: M1144V (valine), M1114G (glycine), M1144L (leucine), M1144T (threonine), M1144A (alanine), and M11441 (isoleucine). M1144V, M1144G, and M1144L were short-listed owing to their lower energy value and reduced impact on hydrophobic and hydrophilic surfaces (versus M1144T), due to an absence of a large side chain, thereby guaranteeing less disturbance to neighbouring side chains (versus M1144A), and due to side chain position being less disruptive (versus M11441), respectively.

### Example 3

Substitution of M1144 with Valine

[0533] Mutation of M1144 to valine was carried out as described above to produce a modified BoNT/A. The single-chain modified BoNT/A was expressed in E. coli and purified using column chromatography prior to proteolytic activation using Lys-C. FIG. 3 shows that the single-chain modified BoNT/A was of a high level of purity (˜100%, FIG. 3 “−”) and that Lys-C cleaved BoNT/A into the corresponding di-chain form (activation was ˜100%, FIG. 3 “+”).

[0534] The modified di-chain BoNT/A was subjected to forced oxidation (as described above) and activity was assessed via the cell-based assay. FIG. 4 shows that the M1144V substitution prevented oxidation at position 1144 (see “Oxidation”). However, surprisingly, the modification not only prevented oxidation-dependent loss of BoNT/A activity, but significantly increased activity of the modified BoNT/A (see FIG. 4, “Activity”).

### Example 4

Substitution of M1144 with Leucine

[0535] Mutation of M1144 to leucine was carried out as described above to produce a modified BoNT/A. The single-chain modified BoNT/A was expressed, purified, and activated as described.

### Example 5

### Activity of BoNT/A M1144V and M1144L

[0536] BoNT/A M1144L and M1144V were compared with unmodified BoNT/A in a cell-based activity assay. EC₅₀ (half maximal effective concentration) values were determined and the relative activities calculated as follows:

$$( Unmodified BoNT / A {EC}_{50} / Modified BoNT / A {EC}_{50} ) \times 100 = relative activity$$

[0537] The activity of unmodified BoNT/A was set at 100%.

TABLE 1
Relative activity of BoNT/A M1144V,
M1144L, and unmodified BoNT/A.

| Molecule | Relative Activity |
|---|---|
| Unmodified | 100% |
| BoNT/A | |
| BoNT/A M1144V | 317% |
| BoNT/A M1144L | 225% |

[0538] The table above shows that both BoNT/A M1144V and M1144L were substantially more active than unmodified BoNT/A even under non-oxidising (or low oxidising) conditions.

### Example 6

### Binding of BoNT/A M1144L and BoNT/A M1144V to SV2c

[0539] Binding experiments were performed on a Biacore 8K (Cytiva) at 25° C. Immobilisation was performed using HBS-EP+ (10 mM Hepes, 150 mM NaCl, 3 mM EDTA and 0.05% v/v Tween 20, pH 7.4) as the running buffer. Using standard EDC/NHS amine coupling, GST-SV2c was coupled to Fc2 of a series S CM5 sensor chip (Cytiva) to a density of ˜50 Resonance Units (RU). Fc1 was blank immobilised by EDC/NHS before blocking with 1M ethanolamine (Cytiva).

[0540] For kinetics measurements, HBS-EP+ supplemented with 0.1 mg/ml BSA was used as the running buffer at a flow rate of 30 μl/min. Botulinum toxins were injected in a 1:1 dilution series comprising 500 to 7.8 nM using single cycle methodology. Association was monitored over 7 increasing concentrations for 200 seconds followed by a single 600 second dissociation. Following each cycle the surface was regenerated with a 60 second injection of 10 mM glycine pH 1.5 (Cytiva) at 10 μl/min.

[0541] Binding affinity and kinetics were determined by fitting the double referenced binding curves using the heterogenous binding model (Biacore Insight Evaluation software).

[0542] The binding affinity and kinetics of BoNT/A M1144L and BoNT/A M1144V were compared to wild-type BoNT/A expressed in CLD1040 (“BoNT/A CLD1040”). Results are presented in the tables below, as well as graphically in FIGS. 5A and B.

TABLE 2
Association and dissociation rates (ka and kd, respectively) and
dissociation constant (K_{D}) for heterogenous binding model K_{D}1.

| | ka1 | kd1 | K_{D}1 |
|---|---|---|---|
| Molecule | (1/Ms ± SD) | (1/s ± SD) | (nM ± SD) |
| BoNT/A | 1.94E+5 ± | 7.60E−2 ± | 393.5 ± |
| (CLD1040) | 1.27E+4 | 3.44E−3 | 13.1 |
| BoNT/A M1144V | 2.19E+5 ± | 7.06E−2 ± | 324.0 ± |
| | 2.36E+4 | 1.66E−3 | 19.2 |
| BoNT/A M1144L | 2.27E+5 ± | 5.33E−2 ± | 234.8 ± |
| | 1.10E+4 | 1.63E−3 | 6.5 |

TABLE 3
Association and dissociation rates (ka and kd, respectively) and
dissociation constant (K_{D}) for heterogenous binding model K_{D}2.

| | ka2 | kd2 | K_{D}2 |
|---|---|---|---|
| Molecule | (1/Ms ± SD) | (1/s ± SD) | (nM + SD) |
| BoNT/A | 6.49E+4 ± | 3.68E−3 ± | 57.4 ± |
| (CLD1040) | 6.83E+3 | 2.17E−4 | 3.4 |
| BoNT/A M1144V | 5.70E+4 ± | 2.65E−3 ± | 47.4 ± |
| | 7.05E+3 | 1.06E−4 | 5.4 |
| BoNT/A M1144L | 8.18E+4 ± | 2.42E−3 ± | 30.1 ± |
| | 9.98E+3 | 7.92E−5 | 3.3 |

[0543] Compared to wild-type BoNT/A, BoNT/A M1144V exhibited a statistically-significant increase in affinity for SV2c in both K_{D}1 and K_{D}2. BoNT/A M144L exhibited an even greater (statically-significant) increase in affinity for SV2c in both K_{D}1 and K_{D}2.

[0544] In conclusion, said increased affinity is likely the underlying mechanism of action for the improved activity of BoNT/A M1144V and M1144L.

### Example 7

Substitution of M1144 with Glycine

[0545] Mutation of M1144 to glycine was carried out as described above for substitution of M1144 with valine to produce a modified BoNT/A. The single-chain modified BoNT/A was expressed, purified, and activated as described.

### Example 8

### Activity of BoNT/A M1144L and BoNT/A M1144G in Oxidising and Non-Oxidising Conditions

[0546] Preparations of BoNT/A M1144L and BoNT/A M1144G were subjected to forced oxidation as described above and their activities tested in a cell-based assay. There was no statistically-significant difference in activity of BoNT/A M1144L or BoNT/A M1144G after 72 hours in oxidising conditions compared to BoNT/A M1144L or BoNT/A M1144G (respectively) prior to exposure to oxidising conditions.

[0547] All publications mentioned in the above specification are herein incorporated by reference. Various modifications and variations of the described methods and system of the present invention will be apparent to those skilled in the art without departing from the scope and spirit of the present invention. Although the present invention has been described in connection with specific preferred embodiments, it should be understood that the invention as claimed should not be unduly limited to such specific embodiments. Indeed, various modifications of the described modes for carrying out the invention which are obvious to those skilled in biochemistry and biotechnology or related fields are intended to be within the scope of the following claims.

The application's sequence listing, which the Patent Office published only in electronic form, follows.

SEQUENCE LISTING (144 sequences)

SEQ ID NO: 1 - DNA, 3888 bp, Clostridium botulinum
atgccattcgtcaacaagcaattcaactacaaagacccagtcaacggcgtcgacatcgcatacatcaagattccgaacgccggtcaaatgcagccggttaaggcttttaagatccacaacaagatttgggttatcccggagcgtgacaccttcacgaacccggaagaaggcgatctgaacccgccaccggaagcgaagcaagtccctgtcagctactacgattcgacgtacctgagcacggataacgaaaaagataactacctgaaaggtgtgaccaagctgttcgaacgtatctacagcacggatctgggtcgcatgctgctgactagcattgttcgcggtatcccgttctggggtggtagcacgattgacaccgaactgaaggttatcgacactaactgcattaacgttattcaaccggatggtagctatcgtagcgaagagctgaatctggtcatcattggcccgagcgcagacattatccaattcgagtgcaagagctttggtcacgaggttctgaatctgacccgcaatggctatggtagcacccagtacattcgtttttcgccggattttaccttcggctttgaagagagcctggaggttgataccaatccgttgctgggtgcgggcaaattcgctaccgatccggctgtcacgctggcccatgaactgatccacgcaggccaccgcctgtacggcattgccatcaacccaaaccgtgtgttcaaggttaatacgaatgcatactacgagatgagcggcctggaagtcagcttcgaagaactgcgcaccttcggtggccatgacgctaaattcattgacagcttgcaagagaatgagttccgtctgtactactataacaaattcaaagacattgcaagcacgttgaacaaggccaaaagcatcgttggtactaccgcgtcgttgcagtatatgaagaatgtgtttaaagagaagtacctgctgtccgaggatacctccggcaagtttagcgttgataagctgaagtttgacaaactgtacaagatgctgaccgagatttacaccgaggacaactttgtgaaattcttcaaagtgttgaatcgtaaaacctatctgaattttgacaaagcggttttcaagattaacatcgtgccgaaggtgaactacaccatctatgacggttttaacctgcgtaacaccaacctggcggcgaactttaacggtcagaatacggaaatcaacaacatgaatttcacgaagttgaagaacttcacgggtctgttcgagttctataagctgctgtgcgtgcgcggtatcatcaccagcaaaaccaaaagcctggacaaaggctacaacaaggcgctgaatgacctgtgcattaaggtaaacaattgggatctgttcttttcgccatccgaagataattttaccaacgacctgaacaagggtgaagaaatcaccagcgatacgaatattgaagcagcggaagagaatatcagcctggatctgatccagcagtactatctgacctttaacttcgacaatgaaccggagaacattagcattgagaatctgagcagcgacattatcggtcagctggaactgatgccgaatatcgaacgtttcccgaacggcaaaaagtacgagctggacaagtacactatgttccattacctgcgtgcacaggagtttgaacacggtaaaagccgtatcgcgctgaccaacagcgttaacgaggccctgctgaacccgagccgtgtctataccttcttcagcagcgactatgttaagaaagtgaacaaagccactgaggccgcgatgttcctgggctgggtggaacagctggtatatgacttcacggacgagacgagcgaagtgagcactaccgacaaaattgctgatattaccatcattatcccgtatattggtccggcactgaacattggcaacatgctgtacaaagacgattttgtgggtgccctgatcttctccggtgccgtgattctgctggagttcattccggagattgcgatcccggtgttgggtaccttcgcgctggtgtcctacatcgcgaataaggttctgacggttcagaccatcgataacgcgctgtcgaaacgtaatgaaaaatgggacgaggtttacaaatacattgttacgaattggctggcgaaagtcaatacccagatcgacctgatccgtaagaaaatgaaagaggcgctggagaatcaggcggaggccaccaaagcaattatcaactaccaatacaaccagtacacggaagaagagaagaataacattaacttcaatatcgatgatttgagcagcaagctgaatgaatctatcaacaaagcgatgatcaatatcaacaagtttttgaatcagtgtagcgtttcgtacctgatgaatagcatgattccgtatggcgtcaaacgtctggaggacttcgacgccagcctgaaagatgcgttgctgaaatacatttacgacaatcgtggtacgctgattggccaagttgaccgcttgaaagacaaagttaacaataccctgagcaccgacatcccatttcaactgagcaagtatgttgataatcaacgtctgttgagcactttcaccgagtatatcaaaaacatcatcaatactagcattctgaacctgcgttacgagagcaatcatctgattgatctgagccgttatgcaagcaagatcaacatcggtagcaaggtcaattttgacccgatcgataagaaccagatccagctgtttaatctggaatcgagcaaaattgaggttatcctgaaaaacgccattgtctacaactccatgtacgagaatttctccaccagcttctggattcgcatcccgaaatacttcaacagcattagcctgaacaacgagtatactatcatcaactgtatggagaacaacagcggttggaaggtgtctctgaactatggtgagatcatttggaccttgcaggacacccaagagatcaagcagcgcgtcgtgttcaagtactctcaaatgatcaacatttccgattacattaatcgttggatcttcgtgaccattacgaataaccgtctgaataacagcaagatttacatcaatggtcgcttgatcgatcagaaaccgattagcaacctgggtaatatccacgcaagcaacaacattatgttcaaattggacggttgccgcgatacccatcgttatatctggatcaagtatttcaacctgtttgataaagaactgaatgagaaggagatcaaagatttgtatgacaaccaatctaacagcggcattttgaaggacttctggggcgattatctgcaatacgataagccgtactatatgctgaacctgtatgatccgaacaaatatgtggatgtcaataatgtgggtattcgtggttacatgtatttgaagggtccgcgtggcagcgttatgacgaccaacatttacctgaactctagcctgtaccgtggtacgaaattcatcattaagaaatatgccagcggcaacaaagataacattgtgcgtaataacgatcgtgtctacatcaacgtggtcgtgaagaataaagagtaccgtctggcgaccaacgcttcgcaggcgggtgttgagaaaattctgagcgcgttggagatccctgatgtcggtaatctgagccaagtcgtggttatgaagagcaagaacgaccagggtatcactaacaagtgcaagatgaacctgcaagacaacaatggtaacgacatcggctttattggtttccaccagttcaacaatattgctaaactggtagcgagcaattggtacaatcgtcagattgagcgcagcagccgtactttgggctgtagctgggagtttatcccggtcgatgatggttggggcgaacgtccgctg

SEQ ID NO: 2 - protein, 1296 aa, Clostridium botulinum
MPFVNKQFNYKDPVNGVDIAYIKIPNAGQMQPVKAFKIHNKIWVIPERDTFTNPEEGDLNPPPEAKQVPVSYYDSTYLSTDNEKDNYLKGVTKLFERIYSTDLGRMLLTSIVRGIPFWGGSTIDTELKVIDTNCINVIQPDGSYRSEELNLVIIGPSADIIQFECKSFGHEVLNLTRNGYGSTQYIRFSPDFTFGFEESLEVDTNPLLGAGKFATDPAVTLAHELIHAGHRLYGIAINPNRVFKVNTNAYYEMSGLEVSFEELRTFGGHDAKFIDSLQENEFRLYYYNKFKDIASTLNKAKSIVGTTASLQYMKNVFKEKYLLSEDTSGKFSVDKLKFDKLYKMLTEIYTEDNFVKFFKVLNRKTYLNFDKAVFKINIVPKVNYTIYDGFNLRNTNLAANFNGQNTEINNMNFTKLKNFTGLFEFYKLLCVRGIITSKTKSLDKGYNKALNDLCIKVNNWDLFFSPSEDNFTNDLNKGEEITSDTNIEAAEENISLDLIQQYYLTFNFDNEPENISIENLSSDIIGQLELMPNIERFPNGKKYELDKYTMFHYLRAQEFEHGKSRIALTNSVNEALLNPSRVYTFFSSDYVKKVNKATEAAMFLGWVEQLVYDFTDETSEVSTTDKIADITIIIPYIGPALNIGNMLYKDDFVGALIFSGAVILLEFIPEIAIPVLGTFALVSYIANKVLTVQTIDNALSKRNEKWDEVYKYIVTNWLAKVNTQIDLIRKKMKEALENQAEATKAIINYQYNQYTEEEKNNINFNIDDLSSKLNESINKAMININKFLNQCSVSYLMNSMIPYGVKRLEDFDASLKDALLKYIYDNRGTLIGQVDRLKDKVNNTLSTDIPFQLSKYVDNQRLLSTFTEYIKNIINTSILNLRYESNHLIDLSRYASKINIGSKVNFDPIDKNQIQLFNLESSKIEVILKNAIVYNSMYENFSTSFWIRIPKYFNSISLNNEYTIINCMENNSGWKVSLNYGEIIWTLQDTQEIKQRVVFKYSQMINISDYINRWIFVTITNNRLNNSKIYINGRLIDQKPISNLGNIHASNNIMFKLDGCRDTHRYIWIKYFNLFDKELNEKEIKDLYDNQSNSGILKDFWGDYLQYDKPYYMLNLYDPNKYVDVNNVGIRGYMYLKGPRGSVMTTNIYLNSSLYRGTKFIIKKYASGNKDNIVRNNDRVYINVVVKNKEYRLATNASQAGVEKILSALEIPDVGNLSQVVVMKSKNDQGITNKCKMNLQDNNGNDIGFIGFHQFNNIAKLVASNWYNRQIERSSRTLGCSWEFIPVDDGWGERPL

SEQ ID NO: 3 - protein, 1296 aa, Artificial Sequence
  Modified BoNT/A1 (M1144V) Polypeptide Sequence
MPFVNKQFNYKDPVNGVDIAYIKIPNAGQMQPVKAFKIHNKIWVIPERDTFTNPEEGDLNPPPEAKQVPVSYYDSTYLSTDNEKDNYLKGVTKLFERIYSTDLGRMLLTSIVRGIPFWGGSTIDTELKVIDTNCINVIQPDGSYRSEELNLVIIGPSADIIQFECKSFGHEVLNLTRNGYGSTQYIRFSPDFTFGFEESLEVDTNPLLGAGKFATDPAVTLAHELIHAGHRLYGIAINPNRVFKVNTNAYYEMSGLEVSFEELRTFGGHDAKFIDSLQENEFRLYYYNKFKDIASTLNKAKSIVGTTASLQYMKNVFKEKYLLSEDTSGKFSVDKLKFDKLYKMLTEIYTEDNFVKFFKVLNRKTYLNFDKAVFKINIVPKVNYTIYDGFNLRNTNLAANFNGQNTEINNMNFTKLKNFTGLFEFYKLLCVRGIITSKTKSLDKGYNKALNDLCIKVNNWDLFFSPSEDNFTNDLNKGEEITSDTNIEAAEENISLDLIQQYYLTFNFDNEPENISIENLSSDIIGQLELMPNIERFPNGKKYELDKYTMFHYLRAQEFEHGKSRIALTNSVNEALLNPSRVYTFFSSDYVKKVNKATEAAMFLGWVEQLVYDFTDETSEVSTTDKIADITIIIPYIGPALNIGNMLYKDDFVGALIFSGAVILLEFIPEIAIPVLGTFALVSYIANKVLTVQTIDNALSKRNEKWDEVYKYIVTNWLAKVNTQIDLIRKKMKEALENQAEATKAIINYQYNQYTEEEKNNINFNIDDLSSKLNESINKAMININKFLNQCSVSYLMNSMIPYGVKRLEDFDASLKDALLKYIYDNRGTLIGQVDRLKDKVNNTLSTDIPFQLSKYVDNQRLLSTFTEYIKNIINTSILNLRYESNHLIDLSRYASKINIGSKVNFDPIDKNQIQLFNLESSKIEVILKNAIVYNSMYENFSTSFWIRIPKYFNSISLNNEYTIINCMENNSGWKVSLNYGEIIWTLQDTQEIKQRVVFKYSQMINISDYINRWIFVTITNNRLNNSKIYINGRLIDQKPISNLGNIHASNNIMFKLDGCRDTHRYIWIKYFNLFDKELNEKEIKDLYDNQSNSGILKDFWGDYLQYDKPYYMLNLYDPNKYVDVNNVGIRGYMYLKGPRGSVVTTNIYLNSSLYRGTKFIIKKYASGNKDNIVRNNDRVYINVVVKNKEYRLATNASQAGVEKILSALEIPDVGNLSQVVVMKSKNDQGITNKCKMNLQDNNGNDIGFIGFHQFNNIAKLVASNWYNRQIERSSRTLGCSWEFIPVDDGWGERPL

SEQ ID NO: 4 - protein, 1296 aa, Artificial Sequence
  Modified BoNT/A1 (M1144G) Polypeptide Sequence
MPFVNKQFNYKDPVNGVDIAYIKIPNAGQMQPVKAFKIHNKIWVIPERDTFTNPEEGDLNPPPEAKQVPVSYYDSTYLSTDNEKDNYLKGVTKLFERIYSTDLGRMLLTSIVRGIPFWGGSTIDTELKVIDTNCINVIQPDGSYRSEELNLVIIGPSADIIQFECKSFGHEVLNLTRNGYGSTQYIRFSPDFTFGFEESLEVDTNPLLGAGKFATDPAVTLAHELIHAGHRLYGIAINPNRVFKVNTNAYYEMSGLEVSFEELRTFGGHDAKFIDSLQENEFRLYYYNKFKDIASTLNKAKSIVGTTASLQYMKNVFKEKYLLSEDTSGKFSVDKLKFDKLYKMLTEIYTEDNFVKFFKVLNRKTYLNFDKAVFKINIVPKVNYTIYDGFNLRNTNLAANFNGQNTEINNMNFTKLKNFTGLFEFYKLLCVRGIITSKTKSLDKGYNKALNDLCIKVNNWDLFFSPSEDNFTNDLNKGEEITSDTNIEAAEENISLDLIQQYYLTFNFDNEPENISIENLSSDIIGQLELMPNIERFPNGKKYELDKYTMFHYLRAQEFEHGKSRIALTNSVNEALLNPSRVYTFFSSDYVKKVNKATEAAMFLGWVEQLVYDFTDETSEVSTTDKIADITIIIPYIGPALNIGNMLYKDDFVGALIFSGAVILLEFIPEIAIPVLGTFALVSYIANKVLTVQTIDNALSKRNEKWDEVYKYIVTNWLAKVNTQIDLIRKKMKEALENQAEATKAIINYQYNQYTEEEKNNINFNIDDLSSKLNESINKAMININKFLNQCSVSYLMNSMIPYGVKRLEDFDASLKDALLKYIYDNRGTLIGQVDRLKDKVNNTLSTDIPFQLSKYVDNQRLLSTFTEYIKNIINTSILNLRYESNHLIDLSRYASKINIGSKVNFDPIDKNQIQLFNLESSKIEVILKNAIVYNSMYENFSTSFWIRIPKYFNSISLNNEYTIINCMENNSGWKVSLNYGEIIWTLQDTQEIKQRVVFKYSQMINISDYINRWIFVTITNNRLNNSKIYINGRLIDQKPISNLGNIHASNNIMFKLDGCRDTHRYIWIKYFNLFDKELNEKEIKDLYDNQSNSGILKDFWGDYLQYDKPYYMLNLYDPNKYVDVNNVGIRGYMYLKGPRGSVGTTNIYLNSSLYRGTKFIIKKYASGNKDNIVRNNDRVYINVVVKNKEYRLATNASQAGVEKILSALEIPDVGNLSQVVVMKSKNDQGITNKCKMNLQDNNGNDIGFIGFHQFNNIAKLVASNWYNRQIERSSRTLGCSWEFIPVDDGWGERPL

SEQ ID NO: 5 - protein, 1296 aa, Artificial Sequence
  Modified BoNT/A1 (M1144L) Polypeptide Sequence
MPFVNKQFNYKDPVNGVDIAYIKIPNAGQMQPVKAFKIHNKIWVIPERDTFTNPEEGDLNPPPEAKQVPVSYYDSTYLSTDNEKDNYLKGVTKLFERIYSTDLGRMLLTSIVRGIPFWGGSTIDTELKVIDTNCINVIQPDGSYRSEELNLVIIGPSADIIQFECKSFGHEVLNLTRNGYGSTQYIRFSPDFTFGFEESLEVDTNPLLGAGKFATDPAVTLAHELIHAGHRLYGIAINPNRVFKVNTNAYYEMSGLEVSFEELRTFGGHDAKFIDSLQENEFRLYYYNKFKDIASTLNKAKSIVGTTASLQYMKNVFKEKYLLSEDTSGKFSVDKLKFDKLYKMLTEIYTEDNFVKFFKVLNRKTYLNFDKAVFKINIVPKVNYTIYDGFNLRNTNLAANFNGQNTEINNMNFTKLKNFTGLFEFYKLLCVRGIITSKTKSLDKGYNKALNDLCIKVNNWDLFFSPSEDNFTNDLNKGEEITSDTNIEAAEENISLDLIQQYYLTFNFDNEPENISIENLSSDIIGQLELMPNIERFPNGKKYELDKYTMFHYLRAQEFEHGKSRIALTNSVNEALLNPSRVYTFFSSDYVKKVNKATEAAMFLGWVEQLVYDFTDETSEVSTTDKIADITIIIPYIGPALNIGNMLYKDDFVGALIFSGAVILLEFIPEIAIPVLGTFALVSYIANKVLTVQTIDNALSKRNEKWDEVYKYIVTNWLAKVNTQIDLIRKKMKEALENQAEATKAIINYQYNQYTEEEKNNINFNIDDLSSKLNESINKAMININKFLNQCSVSYLMNSMIPYGVKRLEDFDASLKDALLKYIYDNRGTLIGQVDRLKDKVNNTLSTDIPFQLSKYVDNQRLLSTFTEYIKNIINTSILNLRYESNHLIDLSRYASKINIGSKVNFDPIDKNQIQLFNLESSKIEVILKNAIVYNSMYENFSTSFWIRIPKYFNSISLNNEYTIINCMENNSGWKVSLNYGEIIWTLQDTQEIKQRVVFKYSQMINISDYINRWIFVTITNNRLNNSKIYINGRLIDQKPISNLGNIHASNNIMFKLDGCRDTHRYIWIKYFNLFDKELNEKEIKDLYDNQSNSGILKDFWGDYLQYDKPYYMLNLYDPNKYVDVNNVGIRGYMYLKGPRGSVLTTNIYLNSSLYRGTKFIIKKYASGNKDNIVRNNDRVYINVVVKNKEYRLATNASQAGVEKILSALEIPDVGNLSQVVVMKSKNDQGITNKCKMNLQDNNGNDIGFIGFHQFNNIAKLVASNWYNRQIERSSRTLGCSWEFIPVDDGWGERPL

SEQ ID NO: 6 - protein, 1296 aa, Artificial Sequence
  Modified BoNT/A1 (M1144T) Polypeptide Sequence
MPFVNKQFNYKDPVNGVDIAYIKIPNAGQMQPVKAFKIHNKIWVIPERDTFTNPEEGDLNPPPEAKQVPVSYYDSTYLSTDNEKDNYLKGVTKLFERIYSTDLGRMLLTSIVRGIPFWGGSTIDTELKVIDTNCINVIQPDGSYRSEELNLVIIGPSADIIQFECKSFGHEVLNLTRNGYGSTQYIRFSPDFTFGFEESLEVDTNPLLGAGKFATDPAVTLAHELIHAGHRLYGIAINPNRVFKVNTNAYYEMSGLEVSFEELRTFGGHDAKFIDSLQENEFRLYYYNKFKDIASTLNKAKSIVGTTASLQYMKNVFKEKYLLSEDTSGKFSVDKLKFDKLYKMLTEIYTEDNFVKFFKVLNRKTYLNFDKAVFKINIVPKVNYTIYDGFNLRNTNLAANFNGQNTEINNMNFTKLKNFTGLFEFYKLLCVRGIITSKTKSLDKGYNKALNDLCIKVNNWDLFFSPSEDNFTNDLNKGEEITSDTNIEAAEENISLDLIQQYYLTFNFDNEPENISIENLSSDIIGQLELMPNIERFPNGKKYELDKYTMFHYLRAQEFEHGKSRIALTNSVNEALLNPSRVYTFFSSDYVKKVNKATEAAMFLGWVEQLVYDFTDETSEVSTTDKIADITIIIPYIGPALNIGNMLYKDDFVGALIFSGAVILLEFIPEIAIPVLGTFALVSYIANKVLTVQTIDNALSKRNEKWDEVYKYIVTNWLAKVNTQIDLIRKKMKEALENQAEATKAIINYQYNQYTEEEKNNINFNIDDLSSKLNESINKAMININKFLNQCSVSYLMNSMIPYGVKRLEDFDASLKDALLKYIYDNRGTLIGQVDRLKDKVNNTLSTDIPFQLSKYVDNQRLLSTFTEYIKNIINTSILNLRYESNHLIDLSRYASKINIGSKVNFDPIDKNQIQLFNLESSKIEVILKNAIVYNSMYENFSTSFWIRIPKYFNSISLNNEYTIINCMENNSGWKVSLNYGEIIWTLQDTQEIKQRVVFKYSQMINISDYINRWIFVTITNNRLNNSKIYINGRLIDQKPISNLGNIHASNNIMFKLDGCRDTHRYIWIKYFNLFDKELNEKEIKDLYDNQSNSGILKDFWGDYLQYDKPYYMLNLYDPNKYVDVNNVGIRGYMYLKGPRGSVTTTNIYLNSSLYRGTKFIIKKYASGNKDNIVRNNDRVYINVVVKNKEYRLATNASQAGVEKILSALEIPDVGNLSQVVVMKSKNDQGITNKCKMNLQDNNGNDIGFIGFHQFNNIAKLVASNWYNRQIERSSRTLGCSWEFIPVDDGWGERPL

SEQ ID NO: 7 - protein, 1296 aa, Artificial Sequence
  Modified BoNT/A1 (M1144A) Polypeptide Sequence
MPFVNKQFNYKDPVNGVDIAYIKIPNAGQMQPVKAFKIHNKIWVIPERDTFTNPEEGDLNPPPEAKQVPVSYYDSTYLSTDNEKDNYLKGVTKLFERIYSTDLGRMLLTSIVRGIPFWGGSTIDTELKVIDTNCINVIQPDGSYRSEELNLVIIGPSADIIQFECKSFGHEVLNLTRNGYGSTQYIRFSPDFTFGFEESLEVDTNPLLGAGKFATDPAVTLAHELIHAGHRLYGIAINPNRVFKVNTNAYYEMSGLEVSFEELRTFGGHDAKFIDSLQENEFRLYYYNKFKDIASTLNKAKSIVGTTASLQYMKNVFKEKYLLSEDTSGKFSVDKLKFDKLYKMLTEIYTEDNFVKFFKVLNRKTYLNFDKAVFKINIVPKVNYTIYDGFNLRNTNLAANFNGQNTEINNMNFTKLKNFTGLFEFYKLLCVRGIITSKTKSLDKGYNKALNDLCIKVNNWDLFFSPSEDNFTNDLNKGEEITSDTNIEAAEENISLDLIQQYYLTFNFDNEPENISIENLSSDIIGQLELMPNIERFPNGKKYELDKYTMFHYLRAQEFEHGKSRIALTNSVNEALLNPSRVYTFFSSDYVKKVNKATEAAMFLGWVEQLVYDFTDETSEVSTTDKIADITIIIPYIGPALNIGNMLYKDDFVGALIFSGAVILLEFIPEIAIPVLGTFALVSYIANKVLTVQTIDNALSKRNEKWDEVYKYIVTNWLAKVNTQIDLIRKKMKEALENQAEATKAIINYQYNQYTEEEKNNINFNIDDLSSKLNESINKAMININKFLNQCSVSYLMNSMIPYGVKRLEDFDASLKDALLKYIYDNRGTLIGQVDRLKDKVNNTLSTDIPFQLSKYVDNQRLLSTFTEYIKNIINTSILNLRYESNHLIDLSRYASKINIGSKVNFDPIDKNQIQLFNLESSKIEVILKNAIVYNSMYENFSTSFWIRIPKYFNSISLNNEYTIINCMENNSGWKVSLNYGEIIWTLQDTQEIKQRVVFKYSQMINISDYINRWIFVTITNNRLNNSKIYINGRLIDQKPISNLGNIHASNNIMFKLDGCRDTHRYIWIKYFNLFDKELNEKEIKDLYDNQSNSGILKDFWGDYLQYDKPYYMLNLYDPNKYVDVNNVGIRGYMYLKGPRGSVATTNIYLNSSLYRGTKFIIKKYASGNKDNIVRNNDRVYINVVVKNKEYRLATNASQAGVEKILSALEIPDVGNLSQVVVMKSKNDQGITNKCKMNLQDNNGNDIGFIGFHQFNNIAKLVASNWYNRQIERSSRTLGCSWEFIPVDDGWGERPL

SEQ ID NO: 8 - protein, 1296 aa, Artificial Sequence
  Modified BoNT/A1 (M1144I) Polypeptide Sequence
MPFVNKQFNYKDPVNGVDIAYIKIPNAGQMQPVKAFKIHNKIWVIPERDTFTNPEEGDLNPPPEAKQVPVSYYDSTYLSTDNEKDNYLKGVTKLFERIYSTDLGRMLLTSIVRGIPFWGGSTIDTELKVIDTNCINVIQPDGSYRSEELNLVIIGPSADIIQFECKSFGHEVLNLTRNGYGSTQYIRFSPDFTFGFEESLEVDTNPLLGAGKFATDPAVTLAHELIHAGHRLYGIAINPNRVFKVNTNAYYEMSGLEVSFEELRTFGGHDAKFIDSLQENEFRLYYYNKFKDIASTLNKAKSIVGTTASLQYMKNVFKEKYLLSEDTSGKFSVDKLKFDKLYKMLTEIYTEDNFVKFFKVLNRKTYLNFDKAVFKINIVPKVNYTIYDGFNLRNTNLAANFNGQNTEINNMNFTKLKNFTGLFEFYKLLCVRGIITSKTKSLDKGYNKALNDLCIKVNNWDLFFSPSEDNFTNDLNKGEEITSDTNIEAAEENISLDLIQQYYLTFNFDNEPENISIENLSSDIIGQLELMPNIERFPNGKKYELDKYTMFHYLRAQEFEHGKSRIALTNSVNEALLNPSRVYTFFSSDYVKKVNKATEAAMFLGWVEQLVYDFTDETSEVSTTDKIADITIIIPYIGPALNIGNMLYKDDFVGALIFSGAVILLEFIPEIAIPVLGTFALVSYIANKVLTVQTIDNALSKRNEKWDEVYKYIVTNWLAKVNTQIDLIRKKMKEALENQAEATKAIINYQYNQYTEEEKNNINFNIDDLSSKLNESINKAMININKFLNQCSVSYLMNSMIPYGVKRLEDFDASLKDALLKYIYDNRGTLIGQVDRLKDKVNNTLSTDIPFQLSKYVDNQRLLSTFTEYIKNIINTSILNLRYESNHLIDLSRYASKINIGSKVNFDPIDKNQIQLFNLESSKIEVILKNAIVYNSMYENFSTSFWIRIPKYFNSISLNNEYTIINCMENNSGWKVSLNYGEIIWTLQDTQEIKQRVVFKYSQMINISDYINRWIFVTITNNRLNNSKIYINGRLIDQKPISNLGNIHASNNIMFKLDGCRDTHRYIWIKYFNLFDKELNEKEIKDLYDNQSNSGILKDFWGDYLQYDKPYYMLNLYDPNKYVDVNNVGIRGYMYLKGPRGSVITTNIYLNSSLYRGTKFIIKKYASGNKDNIVRNNDRVYINVVVKNKEYRLATNASQAGVEKILSALEIPDVGNLSQVVVMKSKNDQGITNKCKMNLQDNNGNDIGFIGFHQFNNIAKLVASNWYNRQIERSSRTLGCSWEFIPVDDGWGERPL

SEQ ID NO: 9 - protein, 1295 aa, Artificial Sequence
  Modified BoNT/A1 (M1144 Deletion) Polypeptide Sequence
MPFVNKQFNYKDPVNGVDIAYIKIPNAGQMQPVKAFKIHNKIWVIPERDTFTNPEEGDLNPPPEAKQVPVSYYDSTYLSTDNEKDNYLKGVTKLFERIYSTDLGRMLLTSIVRGIPFWGGSTIDTELKVIDTNCINVIQPDGSYRSEELNLVIIGPSADIIQFECKSFGHEVLNLTRNGYGSTQYIRFSPDFTFGFEESLEVDTNPLLGAGKFATDPAVTLAHELIHAGHRLYGIAINPNRVFKVNTNAYYEMSGLEVSFEELRTFGGHDAKFIDSLQENEFRLYYYNKFKDIASTLNKAKSIVGTTASLQYMKNVFKEKYLLSEDTSGKFSVDKLKFDKLYKMLTEIYTEDNFVKFFKVLNRKTYLNFDKAVFKINIVPKVNYTIYDGFNLRNTNLAANFNGQNTEINNMNFTKLKNFTGLFEFYKLLCVRGIITSKTKSLDKGYNKALNDLCIKVNNWDLFFSPSEDNFTNDLNKGEEITSDTNIEAAEENISLDLIQQYYLTFNFDNEPENISIENLSSDIIGQLELMPNIERFPNGKKYELDKYTMFHYLRAQEFEHGKSRIALTNSVNEALLNPSRVYTFFSSDYVKKVNKATEAAMFLGWVEQLVYDFTDETSEVSTTDKIADITIIIPYIGPALNIGNMLYKDDFVGALIFSGAVILLEFIPEIAIPVLGTFALVSYIANKVLTVQTIDNALSKRNEKWDEVYKYIVTNWLAKVNTQIDLIRKKMKEALENQAEATKAIINYQYNQYTEEEKNNINFNIDDLSSKLNESINKAMININKFLNQCSVSYLMNSMIPYGVKRLEDFDASLKDALLKYIYDNRGTLIGQVDRLKDKVNNTLSTDIPFQLSKYVDNQRLLSTFTEYIKNIINTSILNLRYESNHLIDLSRYASKINIGSKVNFDPIDKNQIQLFNLESSKIEVILKNAIVYNSMYENFSTSFWIRIPKYFNSISLNNEYTIINCMENNSGWKVSLNYGEIIWTLQDTQEIKQRVVFKYSQMINISDYINRWIFVTITNNRLNNSKIYINGRLIDQKPISNLGNIHASNNIMFKLDGCRDTHRYIWIKYFNLFDKELNEKEIKDLYDNQSNSGILKDFWGDYLQYDKPYYMLNLYDPNKYVDVNNVGIRGYMYLKGPRGSVTTNIYLNSSLYRGTKFIIKKYASGNKDNIVRNNDRVYINVVVKNKEYRLATNASQAGVEKILSALEIPDVGNLSQVVVMKSKNDQGITNKCKMNLQDNNGNDIGFIGFHQFNNIAKLVASNWYNRQIERSSRTLGCSWEFIPVDDGWGERPL

SEQ ID NO: 10 - DNA, 3888 bp, Artificial Sequence
  BoNT/A1 (N886K, N930K, S955K, Q991K, N1026K, N1052K, Q1229K) Nucleic Acid Sequence
atgccattcgtcaacaagcaattcaactacaaagacccagtcaacggcgtcgacatcgcatacatcaagattccgaacgccggtcaaatgcagccggttaaggcttttaagatccacaacaagatttgggttatcccggagcgtgacaccttcacgaacccggaagaaggcgatctgaacccgccaccggaagcgaagcaagtccctgtcagctactacgattcgacgtacctgagcacggataacgaaaaagataactacctgaaaggtgtgaccaagctgttcgaacgtatctacagcacggatctgggtcgcatgctgctgactagcattgttcgcggtatcccgttctggggtggtagcacgattgacaccgaactgaaggttatcgacactaactgcattaacgttattcaaccggatggtagctatcgtagcgaagagctgaatctggtcatcattggcccgagcgcagacattatccaattcgagtgcaagagctttggtcacgaggttctgaatctgacccgcaatggctatggtagcacccagtacattcgtttttcgccggattttaccttcggctttgaagagagcctggaggttgataccaatccgttgctgggtgcgggcaaattcgctaccgatccggctgtcacgctggcccatgaactgatccacgcaggccaccgcctgtacggcattgccatcaacccaaaccgtgtgttcaaggttaatacgaatgcatactacgagatgagcggcctggaagtcagcttcgaagaactgcgcaccttcggtggccatgacgctaaattcattgacagcttgcaagagaatgagttccgtctgtactactataacaaattcaaagacattgcaagcacgttgaacaaggccaaaagcatcgttggtactaccgcgtcgttgcagtatatgaagaatgtgtttaaagagaagtacctgctgtccgaggatacctccggcaagtttagcgttgataagctgaagtttgacaaactgtacaagatgctgaccgagatttacaccgaggacaactttgtgaaattcttcaaagtgttgaatcgtaaaacctatctgaattttgacaaagcggttttcaagattaacatcgtgccgaaggtgaactacaccatctatgacggttttaacctgcgtaacaccaacctggcggcgaactttaacggtcagaatacggaaatcaacaacatgaatttcacgaagttgaagaacttcacgggtctgttcgagttctataagctgctgtgcgtgcgcggtatcatcaccagcaaaaccaaaagcctggacaaaggctacaacaaggcgctgaatgacctgtgcattaaggtaaacaattgggatctgttcttttcgccatccgaagataattttaccaacgacctgaacaagggtgaagaaatcaccagcgatacgaatattgaagcagcggaagagaatatcagcctggatctgatccagcagtactatctgacctttaacttcgacaatgaaccggagaacattagcattgagaatctgagcagcgacattatcggtcagctggaactgatgccgaatatcgaacgtttcccgaacggcaaaaagtacgagctggacaagtacactatgttccattacctgcgtgcacaggagtttgaacacggtaaaagccgtatcgcgctgaccaacagcgttaacgaggccctgctgaacccgagccgtgtctataccttcttcagcagcgactatgttaagaaagtgaacaaagccactgaggccgcgatgttcctgggctgggtggaacagctggtatatgacttcacggacgagacgagcgaagtgagcactaccgacaaaattgctgatattaccatcattatcccgtatattggtccggcactgaacattggcaacatgctgtacaaagacgattttgtgggtgccctgatcttctccggtgccgtgattctgctggagttcattccggagattgcgatcccggtgttgggtaccttcgcgctggtgtcctacatcgcgaataaggttctgacggttcagaccatcgataacgcgctgtcgaaacgtaatgaaaaatgggacgaggtttacaaatacattgttacgaattggctggcgaaagtcaatacccagatcgacctgatccgtaagaaaatgaaagaggcgctggagaatcaggcggaggccaccaaagcaattatcaactaccaatacaaccagtacacggaagaagagaagaataacattaacttcaatatcgatgatttgagcagcaagctgaatgaatctatcaacaaagcgatgatcaatatcaacaagtttttgaatcagtgtagcgtttcgtacctgatgaatagcatgattccgtatggcgtcaaacgtctggaggacttcgacgccagcctgaaagatgcgttgctgaaatacatttacgacaatcgtggtacgctgattggccaagttgaccgcttgaaagacaaagttaacaataccctgagcaccgacatcccatttcaactgagcaagtatgttgataatcaacgtctgttgagcactttcaccgagtatatcaaaaacatcatcaatactagcattctgaacctgcgttacgagagcaagcatctgattgatctgagccgttatgctagcaagatcaacatcggtagcaaggtcaattttgacccgatcgataagaaccagatccagctgtttaatctggaatcgagcaaaattgaggttatcctgaaaaaggccattgtctacaactccatgtacgagaatttctccaccagcttctggattcgcatcccgaaatacttcaacaagattagcctgaacaacgagtatactatcatcaactgtatggagaacaacagcggttggaaggtgtctctgaactatggtgagatcatttggaccttgcaggacaccaaagagatcaagcagcgcgtcgtgttcaagtactctcaaatgatcaacatttccgattacattaatcgttggatcttcgtgaccattacgaataaccgtctgaataagagcaagatttacatcaatggtcgcttgatcgatcagaaaccgattagcaacctgggtaatatccacgcaagcaacaagattatgttcaaattggacggttgccgcgatacccatcgttatatctggatcaagtatttcaacctgtttgataaagaactgaatgagaaggagatcaaagatttgtatgacaaccaatctaacagcggcattttgaaggacttctggggcgattatctgcaatacgataagccgtactatatgctgaacctgtatgatccgaacaaatatgtggatgtcaataatgtgggtattcgtggttacatgtatttgaagggtccgcgtggcagcgttatgacgaccaacatttacctgaactctagcctgtaccgtggtacgaaattcatcattaagaaatatgccagcggcaacaaagataacattgtgcgtaataacgatcgtgtctacatcaacgtggtcgtgaagaataaagagtaccgtctggcgaccaacgcttcgcaggcgggtgttgagaaaattctgagcgcgttggagatccctgatgtcggtaatctgagccaagtcgtggttatgaagagcaagaacgacaagggtatcactaacaagtgcaagatgaacctgcaagacaacaatggtaacgacatcggctttattggtttccaccagttcaacaatattgctaaactggtagcgagcaattggtacaatcgtcagattgagcgcagcagccgtactttgggctgtagctgggagtttatcccggtcgatgatggttggggcgaacgtccgctg

SEQ ID NO: 11 - protein, 1296 aa, Artificial Sequence
  BoNT/A1 (N886K, N930K, S955K, Q991K, N1026K, N1052K, Q1229K) Polypeptide Sequence
MPFVNKQFNYKDPVNGVDIAYIKIPNAGQMQPVKAFKIHNKIWVIPERDTFTNPEEGDLNPPPEAKQVPVSYYDSTYLSTDNEKDNYLKGVTKLFERIYSTDLGRMLLTSIVRGIPFWGGSTIDTELKVIDTNCINVIQPDGSYRSEELNLVIIGPSADIIQFECKSFGHEVLNLTRNGYGSTQYIRFSPDFTFGFEESLEVDTNPLLGAGKFATDPAVTLAHELIHAGHRLYGIAINPNRVFKVNTNAYYEMSGLEVSFEELRTFGGHDAKFIDSLQENEFRLYYYNKFKDIASTLNKAKSIVGTTASLQYMKNVFKEKYLLSEDTSGKFSVDKLKFDKLYKMLTEIYTEDNFVKFFKVLNRKTYLNFDKAVFKINIVPKVNYTIYDGFNLRNTNLAANFNGQNTEINNMNFTKLKNFTGLFEFYKLLCVRGIITSKTKSLDKGYNKALNDLCIKVNNWDLFFSPSEDNFTNDLNKGEEITSDTNIEAAEENISLDLIQQYYLTFNFDNEPENISIENLSSDIIGQLELMPNIERFPNGKKYELDKYTMFHYLRAQEFEHGKSRIALTNSVNEALLNPSRVYTFFSSDYVKKVNKATEAAMFLGWVEQLVYDFTDETSEVSTTDKIADITIIIPYIGPALNIGNMLYKDDFVGALIFSGAVILLEFIPEIAIPVLGTFALVSYIANKVLTVQTIDNALSKRNEKWDEVYKYIVTNWLAKVNTQIDLIRKKMKEALENQAEATKAIINYQYNQYTEEEKNNINFNIDDLSSKLNESINKAMININKFLNQCSVSYLMNSMIPYGVKRLEDFDASLKDALLKYIYDNRGTLIGQVDRLKDKVNNTLSTDIPFQLSKYVDNQRLLSTFTEYIKNIINTSILNLRYESKHLIDLSRYASKINIGSKVNFDPIDKNQIQLFNLESSKIEVILKKAIVYNSMYENFSTSFWIRIPKYFNKISLNNEYTIINCMENNSGWKVSLNYGEIIWTLQDTKEIKQRVVFKYSQMINISDYINRWIFVTITNNRLNKSKIYINGRLIDQKPISNLGNIHASNKIMFKLDGCRDTHRYIWIKYFNLFDKELNEKEIKDLYDNQSNSGILKDFWGDYLQYDKPYYMLNLYDPNKYVDVNNVGIRGYMYLKGPRGSVMTTNIYLNSSLYRGTKFIIKKYASGNKDNIVRNNDRVYINVVVKNKEYRLATNASQAGVEKILSALEIPDVGNLSQVVVMKSKNDKGITNKCKMNLQDNNGNDIGFIGFHQFNNIAKLVASNWYNRQIERSSRTLGCSWEFIPVDDGWGERPL

SEQ ID NO: 12 - protein, 1296 aa, Artificial Sequence
  Modified BoNT/A1 (N886K, N930K, S955K, Q991K, N1026K, N1052K, Q1229K, M1144V) Polypeptide Sequence
MPFVNKQFNYKDPVNGVDIAYIKIPNAGQMQPVKAFKIHNKIWVIPERDTFTNPEEGDLNPPPEAKQVPVSYYDSTYLSTDNEKDNYLKGVTKLFERIYSTDLGRMLLTSIVRGIPFWGGSTIDTELKVIDTNCINVIQPDGSYRSEELNLVIIGPSADIIQFECKSFGHEVLNLTRNGYGSTQYIRFSPDFTFGFEESLEVDTNPLLGAGKFATDPAVTLAHELIHAGHRLYGIAINPNRVFKVNTNAYYEMSGLEVSFEELRTFGGHDAKFIDSLQENEFRLYYYNKFKDIASTLNKAKSIVGTTASLQYMKNVFKEKYLLSEDTSGKFSVDKLKFDKLYKMLTEIYTEDNFVKFFKVLNRKTYLNFDKAVFKINIVPKVNYTIYDGFNLRNTNLAANFNGQNTEINNMNFTKLKNFTGLFEFYKLLCVRGIITSKTKSLDKGYNKALNDLCIKVNNWDLFFSPSEDNFTNDLNKGEEITSDTNIEAAEENISLDLIQQYYLTFNFDNEPENISIENLSSDIIGQLELMPNIERFPNGKKYELDKYTMFHYLRAQEFEHGKSRIALTNSVNEALLNPSRVYTFFSSDYVKKVNKATEAAMFLGWVEQLVYDFTDETSEVSTTDKIADITIIIPYIGPALNIGNMLYKDDFVGALIFSGAVILLEFIPEIAIPVLGTFALVSYIANKVLTVQTIDNALSKRNEKWDEVYKYIVTNWLAKVNTQIDLIRKKMKEALENQAEATKAIINYQYNQYTEEEKNNINFNIDDLSSKLNESINKAMININKFLNQCSVSYLMNSMIPYGVKRLEDFDASLKDALLKYIYDNRGTLIGQVDRLKDKVNNTLSTDIPFQLSKYVDNQRLLSTFTEYIKNIINTSILNLRYESKHLIDLSRYASKINIGSKVNFDPIDKNQIQLFNLESSKIEVILKKAIVYNSMYENFSTSFWIRIPKYFNKISLNNEYTIINCMENNSGWKVSLNYGEIIWTLQDTKEIKQRVVFKYSQMINISDYINRWIFVTITNNRLNKSKIYINGRLIDQKPISNLGNIHASNKIMFKLDGCRDTHRYIWIKYFNLFDKELNEKEIKDLYDNQSNSGILKDFWGDYLQYDKPYYMLNLYDPNKYVDVNNVGIRGYMYLKGPRGSVVTTNIYLNSSLYRGTKFIIKKYASGNKDNIVRNNDRVYINVVVKNKEYRLATNASQAGVEKILSALEIPDVGNLSQVVVMKSKNDKGITNKCKMNLQDNNGNDIGFIGFHQFNNIAKLVASNWYNRQIERSSRTLGCSWEFIPVDDGWGERPL

SEQ ID NO: 13 - protein, 1296 aa, Artificial Sequence
  Modified BoNT/A1 (N886K, N930K, S955K, Q991K, N1026K, N1052K, Q1229K, M1144G) Polypeptide Sequence
MPFVNKQFNYKDPVNGVDIAYIKIPNAGQMQPVKAFKIHNKIWVIPERDTFTNPEEGDLNPPPEAKQVPVSYYDSTYLSTDNEKDNYLKGVTKLFERIYSTDLGRMLLTSIVRGIPFWGGSTIDTELKVIDTNCINVIQPDGSYRSEELNLVIIGPSADIIQFECKSFGHEVLNLTRNGYGSTQYIRFSPDFTFGFEESLEVDTNPLLGAGKFATDPAVTLAHELIHAGHRLYGIAINPNRVFKVNTNAYYEMSGLEVSFEELRTFGGHDAKFIDSLQENEFRLYYYNKFKDIASTLNKAKSIVGTTASLQYMKNVFKEKYLLSEDTSGKFSVDKLKFDKLYKMLTEIYTEDNFVKFFKVLNRKTYLNFDKAVFKINIVPKVNYTIYDGFNLRNTNLAANFNGQNTEINNMNFTKLKNFTGLFEFYKLLCVRGIITSKTKSLDKGYNKALNDLCIKVNNWDLFFSPSEDNFTNDLNKGEEITSDTNIEAAEENISLDLIQQYYLTFNFDNEPENISIENLSSDIIGQLELMPNIERFPNGKKYELDKYTMFHYLRAQEFEHGKSRIALTNSVNEALLNPSRVYTFFSSDYVKKVNKATEAAMFLGWVEQLVYDFTDETSEVSTTDKIADITIIIPYIGPALNIGNMLYKDDFVGALIFSGAVILLEFIPEIAIPVLGTFALVSYIANKVLTVQTIDNALSKRNEKWDEVYKYIVTNWLAKVNTQIDLIRKKMKEALENQAEATKAIINYQYNQYTEEEKNNINFNIDDLSSKLNESINKAMININKFLNQCSVSYLMNSMIPYGVKRLEDFDASLKDALLKYIYDNRGTLIGQVDRLKDKVNNTLSTDIPFQLSKYVDNQRLLSTFTEYIKNIINTSILNLRYESKHLIDLSRYASKINIGSKVNFDPIDKNQIQLFNLESSKIEVILKKAIVYNSMYENFSTSFWIRIPKYFNKISLNNEYTIINCMENNSGWKVSLNYGEIIWTLQDTKEIKQRVVFKYSQMINISDYINRWIFVTITNNRLNKSKIYINGRLIDQKPISNLGNIHASNKIMFKLDGCRDTHRYIWIKYFNLFDKELNEKEIKDLYDNQSNSGILKDFWGDYLQYDKPYYMLNLYDPNKYVDVNNVGIRGYMYLKGPRGSVGTTNIYLNSSLYRGTKFIIKKYASGNKDNIVRNNDRVYINVVVKNKEYRLATNASQAGVEKILSALEIPDVGNLSQVVVMKSKNDKGITNKCKMNLQDNNGNDIGFIGFHQFNNIAKLVASNWYNRQIERSSRTLGCSWEFIPVDDGWGERPL

SEQ ID NO: 14 - protein, 1296 aa, Artificial Sequence
  Modified BoNT/A1 (N886K, N930K, S955K, Q991K, N1026K, N1052K, Q1229K, M1144L) Polypeptide Sequence
MPFVNKQFNYKDPVNGVDIAYIKIPNAGQMQPVKAFKIHNKIWVIPERDTFTNPEEGDLNPPPEAKQVPVSYYDSTYLSTDNEKDNYLKGVTKLFERIYSTDLGRMLLTSIVRGIPFWGGSTIDTELKVIDTNCINVIQPDGSYRSEELNLVIIGPSADIIQFECKSFGHEVLNLTRNGYGSTQYIRFSPDFTFGFEESLEVDTNPLLGAGKFATDPAVTLAHELIHAGHRLYGIAINPNRVFKVNTNAYYEMSGLEVSFEELRTFGGHDAKFIDSLQENEFRLYYYNKFKDIASTLNKAKSIVGTTASLQYMKNVFKEKYLLSEDTSGKFSVDKLKFDKLYKMLTEIYTEDNFVKFFKVLNRKTYLNFDKAVFKINIVPKVNYTIYDGFNLRNTNLAANFNGQNTEINNMNFTKLKNFTGLFEFYKLLCVRGIITSKTKSLDKGYNKALNDLCIKVNNWDLFFSPSEDNFTNDLNKGEEITSDTNIEAAEENISLDLIQQYYLTFNFDNEPENISIENLSSDIIGQLELMPNIERFPNGKKYELDKYTMFHYLRAQEFEHGKSRIALTNSVNEALLNPSRVYTFFSSDYVKKVNKATEAAMFLGWVEQLVYDFTDETSEVSTTDKIADITIIIPYIGPALNIGNMLYKDDFVGALIFSGAVILLEFIPEIAIPVLGTFALVSYIANKVLTVQTIDNALSKRNEKWDEVYKYIVTNWLAKVNTQIDLIRKKMKEALENQAEATKAIINYQYNQYTEEEKNNINFNIDDLSSKLNESINKAMININKFLNQCSVSYLMNSMIPYGVKRLEDFDASLKDALLKYIYDNRGTLIGQVDRLKDKVNNTLSTDIPFQLSKYVDNQRLLSTFTEYIKNIINTSILNLRYESKHLIDLSRYASKINIGSKVNFDPIDKNQIQLFNLESSKIEVILKKAIVYNSMYENFSTSFWIRIPKYFNKISLNNEYTIINCMENNSGWKVSLNYGEIIWTLQDTKEIKQRVVFKYSQMINISDYINRWIFVTITNNRLNKSKIYINGRLIDQKPISNLGNIHASNKIMFKLDGCRDTHRYIWIKYFNLFDKELNEKEIKDLYDNQSNSGILKDFWGDYLQYDKPYYMLNLYDPNKYVDVNNVGIRGYMYLKGPRGSVLTTNIYLNSSLYRGTKFIIKKYASGNKDNIVRNNDRVYINVVVKNKEYRLATNASQAGVEKILSALEIPDVGNLSQVVVMKSKNDKGITNKCKMNLQDNNGNDIGFIGFHQFNNIAKLVASNWYNRQIERSSRTLGCSWEFIPVDDGWGERPL

SEQ ID NO: 15 - protein, 1296 aa, Artificial Sequence
  Modified BoNT/A1 (N886K, N930K, S955K, Q991K, N1026K, N1052K, Q1229K, M1144T) Polypeptide Sequence
MPFVNKQFNYKDPVNGVDIAYIKIPNAGQMQPVKAFKIHNKIWVIPERDTFTNPEEGDLNPPPEAKQVPVSYYDSTYLSTDNEKDNYLKGVTKLFERIYSTDLGRMLLTSIVRGIPFWGGSTIDTELKVIDTNCINVIQPDGSYRSEELNLVIIGPSADIIQFECKSFGHEVLNLTRNGYGSTQYIRFSPDFTFGFEESLEVDTNPLLGAGKFATDPAVTLAHELIHAGHRLYGIAINPNRVFKVNTNAYYEMSGLEVSFEELRTFGGHDAKFIDSLQENEFRLYYYNKFKDIASTLNKAKSIVGTTASLQYMKNVFKEKYLLSEDTSGKFSVDKLKFDKLYKMLTEIYTEDNFVKFFKVLNRKTYLNFDKAVFKINIVPKVNYTIYDGFNLRNTNLAANFNGQNTEINNMNFTKLKNFTGLFEFYKLLCVRGIITSKTKSLDKGYNKALNDLCIKVNNWDLFFSPSEDNFTNDLNKGEEITSDTNIEAAEENISLDLIQQYYLTFNFDNEPENISIENLSSDIIGQLELMPNIERFPNGKKYELDKYTMFHYLRAQEFEHGKSRIALTNSVNEALLNPSRVYTFFSSDYVKKVNKATEAAMFLGWVEQLVYDFTDETSEVSTTDKIADITIIIPYIGPALNIGNMLYKDDFVGALIFSGAVILLEFIPEIAIPVLGTFALVSYIANKVLTVQTIDNALSKRNEKWDEVYKYIVTNWLAKVNTQIDLIRKKMKEALENQAEATKAIINYQYNQYTEEEKNNINFNIDDLSSKLNESINKAMININKFLNQCSVSYLMNSMIPYGVKRLEDFDASLKDALLKYIYDNRGTLIGQVDRLKDKVNNTLSTDIPFQLSKYVDNQRLLSTFTEYIKNIINTSILNLRYESKHLIDLSRYASKINIGSKVNFDPIDKNQIQLFNLESSKIEVILKKAIVYNSMYENFSTSFWIRIPKYFNKISLNNEYTIINCMENNSGWKVSLNYGEIIWTLQDTKEIKQRVVFKYSQMINISDYINRWIFVTITNNRLNKSKIYINGRLIDQKPISNLGNIHASNKIMFKLDGCRDTHRYIWIKYFNLFDKELNEKEIKDLYDNQSNSGILKDFWGDYLQYDKPYYMLNLYDPNKYVDVNNVGIRGYMYLKGPRGSVTTTNIYLNSSLYRGTKFIIKKYASGNKDNIVRNNDRVYINVVVKNKEYRLATNASQAGVEKILSALEIPDVGNLSQVVVMKSKNDKGITNKCKMNLQDNNGNDIGFIGFHQFNNIAKLVASNWYNRQIERSSRTLGCSWEFIPVDDGWGERPL

SEQ ID NO: 16 - protein, 1296 aa, Artificial Sequence
  Modified BoNT/A1 (N886K, N930K, S955K, Q991K, N1026K, N1052K, Q1229K, M1144A) Polypeptide Sequence
MPFVNKQFNYKDPVNGVDIAYIKIPNAGQMQPVKAFKIHNKIWVIPERDTFTNPEEGDLNPPPEAKQVPVSYYDSTYLSTDNEKDNYLKGVTKLFERIYSTDLGRMLLTSIVRGIPFWGGSTIDTELKVIDTNCINVIQPDGSYRSEELNLVIIGPSADIIQFECKSFGHEVLNLTRNGYGSTQYIRFSPDFTFGFEESLEVDTNPLLGAGKFATDPAVTLAHELIHAGHRLYGIAINPNRVFKVNTNAYYEMSGLEVSFEELRTFGGHDAKFIDSLQENEFRLYYYNKFKDIASTLNKAKSIVGTTASLQYMKNVFKEKYLLSEDTSGKFSVDKLKFDKLYKMLTEIYTEDNFVKFFKVLNRKTYLNFDKAVFKINIVPKVNYTIYDGFNLRNTNLAANFNGQNTEINNMNFTKLKNFTGLFEFYKLLCVRGIITSKTKSLDKGYNKALNDLCIKVNNWDLFFSPSEDNFTNDLNKGEEITSDTNIEAAEENISLDLIQQYYLTFNFDNEPENISIENLSSDIIGQLELMPNIERFPNGKKYELDKYTMFHYLRAQEFEHGKSRIALTNSVNEALLNPSRVYTFFSSDYVKKVNKATEAAMFLGWVEQLVYDFTDETSEVSTTDKIADITIIIPYIGPALNIGNMLYKDDFVGALIFSGAVILLEFIPEIAIPVLGTFALVSYIANKVLTVQTIDNALSKRNEKWDEVYKYIVTNWLAKVNTQIDLIRKKMKEALENQAEATKAIINYQYNQYTEEEKNNINFNIDDLSSKLNESINKAMININKFLNQCSVSYLMNSMIPYGVKRLEDFDASLKDALLKYIYDNRGTLIGQVDRLKDKVNNTLSTDIPFQLSKYVDNQRLLSTFTEYIKNIINTSILNLRYESKHLIDLSRYASKINIGSKVNFDPIDKNQIQLFNLESSKIEVILKKAIVYNSMYENFSTSFWIRIPKYFNKISLNNEYTIINCMENNSGWKVSLNYGEIIWTLQDTKEIKQRVVFKYSQMINISDYINRWIFVTITNNRLNKSKIYINGRLIDQKPISNLGNIHASNKIMFKLDGCRDTHRYIWIKYFNLFDKELNEKEIKDLYDNQSNSGILKDFWGDYLQYDKPYYMLNLYDPNKYVDVNNVGIRGYMYLKGPRGSVATTNIYLNSSLYRGTKFIIKKYASGNKDNIVRNNDRVYINVVVKNKEYRLATNASQAGVEKILSALEIPDVGNLSQVVVMKSKNDKGITNKCKMNLQDNNGNDIGFIGFHQFNNIAKLVASNWYNRQIERSSRTLGCSWEFIPVDDGWGERPL

SEQ ID NO: 17 - protein, 1296 aa, Artificial Sequence
  Modified BoNT/A1 (N886K, N930K, S955K, Q991K, N1026K, N1052K, Q1229K, M1144I) Polypeptide Sequence
MPFVNKQFNYKDPVNGVDIAYIKIPNAGQMQPVKAFKIHNKIWVIPERDTFTNPEEGDLNPPPEAKQVPVSYYDSTYLSTDNEKDNYLKGVTKLFERIYSTDLGRMLLTSIVRGIPFWGGSTIDTELKVIDTNCINVIQPDGSYRSEELNLVIIGPSADIIQFECKSFGHEVLNLTRNGYGSTQYIRFSPDFTFGFEESLEVDTNPLLGAGKFATDPAVTLAHELIHAGHRLYGIAINPNRVFKVNTNAYYEMSGLEVSFEELRTFGGHDAKFIDSLQENEFRLYYYNKFKDIASTLNKAKSIVGTTASLQYMKNVFKEKYLLSEDTSGKFSVDKLKFDKLYKMLTEIYTEDNFVKFFKVLNRKTYLNFDKAVFKINIVPKVNYTIYDGFNLRNTNLAANFNGQNTEINNMNFTKLKNFTGLFEFYKLLCVRGIITSKTKSLDKGYNKALNDLCIKVNNWDLFFSPSEDNFTNDLNKGEEITSDTNIEAAEENISLDLIQQYYLTFNFDNEPENISIENLSSDIIGQLELMPNIERFPNGKKYELDKYTMFHYLRAQEFEHGKSRIALTNSVNEALLNPSRVYTFFSSDYVKKVNKATEAAMFLGWVEQLVYDFTDETSEVSTTDKIADITIIIPYIGPALNIGNMLYKDDFVGALIFSGAVILLEFIPEIAIPVLGTFALVSYIANKVLTVQTIDNALSKRNEKWDEVYKYIVTNWLAKVNTQIDLIRKKMKEALENQAEATKAIINYQYNQYTEEEKNNINFNIDDLSSKLNESINKAMININKFLNQCSVSYLMNSMIPYGVKRLEDFDASLKDALLKYIYDNRGTLIGQVDRLKDKVNNTLSTDIPFQLSKYVDNQRLLSTFTEYIKNIINTSILNLRYESKHLIDLSRYASKINIGSKVNFDPIDKNQIQLFNLESSKIEVILKKAIVYNSMYENFSTSFWIRIPKYFNKISLNNEYTIINCMENNSGWKVSLNYGEIIWTLQDTKEIKQRVVFKYSQMINISDYINRWIFVTITNNRLNKSKIYINGRLIDQKPISNLGNIHASNKIMFKLDGCRDTHRYIWIKYFNLFDKELNEKEIKDLYDNQSNSGILKDFWGDYLQYDKPYYMLNLYDPNKYVDVNNVGIRGYMYLKGPRGSVITTNIYLNSSLYRGTKFIIKKYASGNKDNIVRNNDRVYINVVVKNKEYRLATNASQAGVEKILSALEIPDVGNLSQVVVMKSKNDKGITNKCKMNLQDNNGNDIGFIGFHQFNNIAKLVASNWYNRQIERSSRTLGCSWEFIPVDDGWGERPL

SEQ ID NO: 18 - protein, 1295 aa, Artificial Sequence
  Modified BoNT/A1 (N886K, N930K, S955K, Q991K, N1026K, N1052K, Q1229K, M1144 Deletion) Polypeptide Sequence
MPFVNKQFNYKDPVNGVDIAYIKIPNAGQMQPVKAFKIHNKIWVIPERDTFTNPEEGDLNPPPEAKQVPVSYYDSTYLSTDNEKDNYLKGVTKLFERIYSTDLGRMLLTSIVRGIPFWGGSTIDTELKVIDTNCINVIQPDGSYRSEELNLVIIGPSADIIQFECKSFGHEVLNLTRNGYGSTQYIRFSPDFTFGFEESLEVDTNPLLGAGKFATDPAVTLAHELIHAGHRLYGIAINPNRVFKVNTNAYYEMSGLEVSFEELRTFGGHDAKFIDSLQENEFRLYYYNKFKDIASTLNKAKSIVGTTASLQYMKNVFKEKYLLSEDTSGKFSVDKLKFDKLYKMLTEIYTEDNFVKFFKVLNRKTYLNFDKAVFKINIVPKVNYTIYDGFNLRNTNLAANFNGQNTEINNMNFTKLKNFTGLFEFYKLLCVRGIITSKTKSLDKGYNKALNDLCIKVNNWDLFFSPSEDNFTNDLNKGEEITSDTNIEAAEENISLDLIQQYYLTFNFDNEPENISIENLSSDIIGQLELMPNIERFPNGKKYELDKYTMFHYLRAQEFEHGKSRIALTNSVNEALLNPSRVYTFFSSDYVKKVNKATEAAMFLGWVEQLVYDFTDETSEVSTTDKIADITIIIPYIGPALNIGNMLYKDDFVGALIFSGAVILLEFIPEIAIPVLGTFALVSYIANKVLTVQTIDNALSKRNEKWDEVYKYIVTNWLAKVNTQIDLIRKKMKEALENQAEATKAIINYQYNQYTEEEKNNINFNIDDLSSKLNESINKAMININKFLNQCSVSYLMNSMIPYGVKRLEDFDASLKDALLKYIYDNRGTLIGQVDRLKDKVNNTLSTDIPFQLSKYVDNQRLLSTFTEYIKNIINTSILNLRYESKHLIDLSRYASKINIGSKVNFDPIDKNQIQLFNLESSKIEVILKKAIVYNSMYENFSTSFWIRIPKYFNKISLNNEYTIINCMENNSGWKVSLNYGEIIWTLQDTKEIKQRVVFKYSQMINISDYINRWIFVTITNNRLNKSKIYINGRLIDQKPISNLGNIHASNKIMFKLDGCRDTHRYIWIKYFNLFDKELNEKEIKDLYDNQSNSGILKDFWGDYLQYDKPYYMLNLYDPNKYVDVNNVGIRGYMYLKGPRGSVTTNIYLNSSLYRGTKFIIKKYASGNKDNIVRNNDRVYINVVVKNKEYRLATNASQAGVEKILSALEIPDVGNLSQVVVMKSKNDKGITNKCKMNLQDNNGNDIGFIGFHQFNNIAKLVASNWYNRQIERSSRTLGCSWEFIPVDDGWGERPL

SEQ ID NO: 19 - DNA, 3888 bp, Artificial Sequence
  BoNT/A1 (N954K, N930K, S955K, Q991K, N1026K, N1052K, Q1229K) Nucleic Acid Sequence
atgccattcgtcaacaagcaattcaactacaaagacccagtcaacggcgtcgacatcgcatacatcaagattccgaacgccggtcaaatgcagccggttaaggcttttaagatccacaacaagatttgggttatcccggagcgtgacaccttcacgaacccggaagaaggcgatctgaacccgccaccggaagcgaagcaagtccctgtcagctactacgattcgacgtacctgagcacggataacgaaaaagataactacctgaaaggtgtgaccaagctgttcgaacgtatctacagcacggatctgggtcgcatgctgctgactagcattgttcgcggtatcccgttctggggtggtagcacgattgacaccgaactgaaggttatcgacactaactgcattaacgttattcaaccggatggtagctatcgtagcgaagagctgaatctggtcatcattggcccgagcgcagacattatccaattcgagtgcaagagctttggtcacgaggttctgaatctgacccgcaatggctatggtagcacccagtacattcgtttttcgccggattttaccttcggctttgaagagagcctggaggttgataccaatccgttgctgggtgcgggcaaattcgctaccgatccggctgtcacgctggcccatgaactgatccacgcaggccaccgcctgtacggcattgccatcaacccaaaccgtgtgttcaaggttaatacgaatgcatactacgagatgagcggcctggaagtcagcttcgaagaactgcgcaccttcggtggccatgacgctaaattcattgacagcttgcaagagaatgagttccgtctgtactactataacaaattcaaagacattgcaagcacgttgaacaaggccaaaagcatcgttggtactaccgcgtcgttgcagtatatgaagaatgtgtttaaagagaagtacctgctgtccgaggatacctccggcaagtttagcgttgataagctgaagtttgacaaactgtacaagatgctgaccgagatttacaccgaggacaactttgtgaaattcttcaaagtgttgaatcgtaaaacctatctgaattttgacaaagcggttttcaagattaacatcgtgccgaaggtgaactacaccatctatgacggttttaacctgcgtaacaccaacctggcggcgaactttaacggtcagaatacggaaatcaacaacatgaatttcacgaagttgaagaacttcacgggtctgttcgagttctataagctgctgtgcgtgcgcggtatcatcaccagcaaaaccaaaagcctggacaaaggctacaacaaggcgctgaatgacctgtgcattaaggtaaacaattgggatctgttcttttcgccatccgaagataattttaccaacgacctgaacaagggtgaagaaatcaccagcgatacgaatattgaagcagcggaagagaatatcagcctggatctgatccagcagtactatctgacctttaacttcgacaatgaaccggagaacattagcattgagaatctgagcagcgacattatcggtcagctggaactgatgccgaatatcgaacgtttcccgaacggcaaaaagtacgagctggacaagtacactatgttccattacctgcgtgcacaggagtttgaacacggtaaaagccgtatcgcgctgaccaacagcgttaacgaggccctgctgaacccgagccgtgtctataccttcttcagcagcgactatgttaagaaagtgaacaaagccactgaggccgcgatgttcctgggctgggtggaacagctggtatatgacttcacggacgagacgagcgaagtgagcactaccgacaaaattgctgatattaccatcattatcccgtatattggtccggcactgaacattggcaacatgctgtacaaagacgattttgtgggtgccctgatcttctccggtgccgtgattctgctggagttcattccggagattgcgatcccggtgttgggtaccttcgcgctggtgtcctacatcgcgaataaggttctgacggttcagaccatcgataacgcgctgtcgaaacgtaatgaaaaatgggacgaggtttacaaatacattgttacgaattggctggcgaaagtcaatacccagatcgacctgatccgtaagaaaatgaaagaggcgctggagaatcaggcggaggccaccaaagcaattatcaactaccaatacaaccagtacacggaagaagagaagaataacattaacttcaatatcgatgatttgagcagcaagctgaatgaatctatcaacaaagcgatgatcaatatcaacaagtttttgaatcagtgtagcgtttcgtacctgatgaatagcatgattccgtatggcgtcaaacgtctggaggacttcgacgccagcctgaaagatgcgttgctgaaatacatttacgacaatcgtggtacgctgattggccaagttgaccgcttgaaagacaaagttaacaataccctgagcaccgacatcccatttcaactgagcaagtatgttgataatcaacgtctgttgagcactttcaccgagtatatcaaaaacatcatcaatactagcattctgaacctgcgttacgagagcaatcatctgattgatctgagccgttatgctagcaagatcaacatcggtagcaaggtcaattttgacccgatcgataagaaccagatccagctgtttaatctggaatcgagcaaaattgaggttatcctgaaaaaggccattgtctacaactccatgtacgagaatttctccaccagcttctggattcgcatcccgaaatacttcaagaagattagcctgaacaacgagtatactatcatcaactgtatggagaacaacagcggttggaaggtgtctctgaactatggtgagatcatttggaccttgcaggacaccaaagagatcaagcagcgcgtcgtgttcaagtactctcaaatgatcaacatttccgattacattaatcgttggatcttcgtgaccattacgaataaccgtctgaataagagcaagatttacatcaatggtcgcttgatcgatcagaaaccgattagcaacctgggtaatatccacgcaagcaacaagattatgttcaaattggacggttgccgcgatacccatcgttatatctggatcaagtatttcaacctgtttgataaagaactgaatgagaaggagatcaaagatttgtatgacaaccaatctaacagcggcattttgaaggacttctggggcgattatctgcaatacgataagccgtactatatgctgaacctgtatgatccgaacaaatatgtggatgtcaataatgtgggtattcgtggttacatgtatttgaagggtccgcgtggcagcgttatgacgaccaacatttacctgaactctagcctgtaccgtggtacgaaattcatcattaagaaatatgccagcggcaacaaagataacattgtgcgtaataacgatcgtgtctacatcaacgtggtcgtgaagaataaagagtaccgtctggcgaccaacgcttcgcaggcgggtgttgagaaaattctgagcgcgttggagatccctgatgtcggtaatctgagccaagtcgtggttatgaagagcaagaacgacaagggtatcactaacaagtgcaagatgaacctgcaagacaacaatggtaacgacatcggctttattggtttccaccagttcaacaatattgctaaactggtagcgagcaattggtacaatcgtcagattgagcgcagcagccgtactttgggctgtagctgggagtttatcccggtcgatgatggttggggcgaacgtccgctg

SEQ ID NO: 20 - protein, 1296 aa, Artificial Sequence
  BoNT/A1 (N954K, N930K, S955K, Q991K, N1026K, N1052K, Q1229K) Polypeptide Sequence
MPFVNKQFNYKDPVNGVDIAYIKIPNAGQMQPVKAFKIHNKIWVIPERDTFTNPEEGDLNPPPEAKQVPVSYYDSTYLSTDNEKDNYLKGVTKLFERIYSTDLGRMLLTSIVRGIPFWGGSTIDTELKVIDTNCINVIQPDGSYRSEELNLVIIGPSADIIQFECKSFGHEVLNLTRNGYGSTQYIRFSPDFTFGFEESLEVDTNPLLGAGKFATDPAVTLAHELIHAGHRLYGIAINPNRVFKVNTNAYYEMSGLEVSFEELRTFGGHDAKFIDSLQENEFRLYYYNKFKDIASTLNKAKSIVGTTASLQYMKNVFKEKYLLSEDTSGKFSVDKLKFDKLYKMLTEIYTEDNFVKFFKVLNRKTYLNFDKAVFKINIVPKVNYTIYDGFNLRNTNLAANFNGQNTEINNMNFTKLKNFTGLFEFYKLLCVRGIITSKTKSLDKGYNKALNDLCIKVNNWDLFFSPSEDNFTNDLNKGEEITSDTNIEAAEENISLDLIQQYYLTFNFDNEPENISIENLSSDIIGQLELMPNIERFPNGKKYELDKYTMFHYLRAQEFEHGKSRIALTNSVNEALLNPSRVYTFFSSDYVKKVNKATEAAMFLGWVEQLVYDFTDETSEVSTTDKIADITIIIPYIGPALNIGNMLYKDDFVGALIFSGAVILLEFIPEIAIPVLGTFALVSYIANKVLTVQTIDNALSKRNEKWDEVYKYIVTNWLAKVNTQIDLIRKKMKEALENQAEATKAIINYQYNQYTEEEKNNINFNIDDLSSKLNESINKAMININKFLNQCSVSYLMNSMIPYGVKRLEDFDASLKDALLKYIYDNRGTLIGQVDRLKDKVNNTLSTDIPFQLSKYVDNQRLLSTFTEYIKNIINTSILNLRYESNHLIDLSRYASKINIGSKVNFDPIDKNQIQLFNLESSKIEVILKKAIVYNSMYENFSTSFWIRIPKYFKKISLNNEYTIINCMENNSGWKVSLNYGEIIWTLQDTKEIKQRVVFKYSQMINISDYINRWIFVTITNNRLNKSKIYINGRLIDQKPISNLGNIHASNKIMFKLDGCRDTHRYIWIKYFNLFDKELNEKEIKDLYDNQSNSGILKDFWGDYLQYDKPYYMLNLYDPNKYVDVNNVGIRGYMYLKGPRGSVMTTNIYLNSSLYRGTKFIIKKYASGNKDNIVRNNDRVYINVVVKNKEYRLATNASQAGVEKILSALEIPDVGNLSQVVVMKSKNDKGITNKCKMNLQDNNGNDIGFIGFHQFNNIAKLVASNWYNRQIERSSRTLGCSWEFIPVDDGWGERPL

SEQ ID NO: 21 - protein, 1296 aa, Artificial Sequence
  Modified BoNT/A1 (N954K, N930K, S955K, Q991K, N1026K, N1052K, Q1229K, M1144V) Polypeptide Sequence
MPFVNKQFNYKDPVNGVDIAYIKIPNAGQMQPVKAFKIHNKIWVIPERDTFTNPEEGDLNPPPEAKQVPVSYYDSTYLSTDNEKDNYLKGVTKLFERIYSTDLGRMLLTSIVRGIPFWGGSTIDTELKVIDTNCINVIQPDGSYRSEELNLVIIGPSADIIQFECKSFGHEVLNLTRNGYGSTQYIRFSPDFTFGFEESLEVDTNPLLGAGKFATDPAVTLAHELIHAGHRLYGIAINPNRVFKVNTNAYYEMSGLEVSFEELRTFGGHDAKFIDSLQENEFRLYYYNKFKDIASTLNKAKSIVGTTASLQYMKNVFKEKYLLSEDTSGKFSVDKLKFDKLYKMLTEIYTEDNFVKFFKVLNRKTYLNFDKAVFKINIVPKVNYTIYDGFNLRNTNLAANFNGQNTEINNMNFTKLKNFTGLFEFYKLLCVRGIITSKTKSLDKGYNKALNDLCIKVNNWDLFFSPSEDNFTNDLNKGEEITSDTNIEAAEENISLDLIQQYYLTFNFDNEPENISIENLSSDIIGQLELMPNIERFPNGKKYELDKYTMFHYLRAQEFEHGKSRIALTNSVNEALLNPSRVYTFFSSDYVKKVNKATEAAMFLGWVEQLVYDFTDETSEVSTTDKIADITIIIPYIGPALNIGNMLYKDDFVGALIFSGAVILLEFIPEIAIPVLGTFALVSYIANKVLTVQTIDNALSKRNEKWDEVYKYIVTNWLAKVNTQIDLIRKKMKEALENQAEATKAIINYQYNQYTEEEKNNINFNIDDLSSKLNESINKAMININKFLNQCSVSYLMNSMIPYGVKRLEDFDASLKDALLKYIYDNRGTLIGQVDRLKDKVNNTLSTDIPFQLSKYVDNQRLLSTFTEYIKNIINTSILNLRYESNHLIDLSRYASKINIGSKVNFDPIDKNQIQLFNLESSKIEVILKKAIVYNSMYENFSTSFWIRIPKYFKKISLNNEYTIINCMENNSGWKVSLNYGEIIWTLQDTKEIKQRVVFKYSQMINISDYINRWIFVTITNNRLNKSKIYINGRLIDQKPISNLGNIHASNKIMFKLDGCRDTHRYIWIKYFNLFDKELNEKEIKDLYDNQSNSGILKDFWGDYLQYDKPYYMLNLYDPNKYVDVNNVGIRGYMYLKGPRGSVVTTNIYLNSSLYRGTKFIIKKYASGNKDNIVRNNDRVYINVVVKNKEYRLATNASQAGVEKILSALEIPDVGNLSQVVVMKSKNDKGITNKCKMNLQDNNGNDIGFIGFHQFNNIAKLVASNWYNRQIERSSRTLGCSWEFIPVDDGWGERPL

SEQ ID NO: 22 - protein, 1296 aa, Artificial Sequence
  Modified BoNT/A1 (N954K, N930K, S955K, Q991K, N1026K, N1052K, Q1229K, M1144G) Polypeptide Sequence
MPFVNKQFNYKDPVNGVDIAYIKIPNAGQMQPVKAFKIHNKIWVIPERDTFTNPEEGDLNPPPEAKQVPVSYYDSTYLSTDNEKDNYLKGVTKLFERIYSTDLGRMLLTSIVRGIPFWGGSTIDTELKVIDTNCINVIQPDGSYRSEELNLVIIGPSADIIQFECKSFGHEVLNLTRNGYGSTQYIRFSPDFTFGFEESLEVDTNPLLGAGKFATDPAVTLAHELIHAGHRLYGIAINPNRVFKVNTNAYYEMSGLEVSFEELRTFGGHDAKFIDSLQENEFRLYYYNKFKDIASTLNKAKSIVGTTASLQYMKNVFKEKYLLSEDTSGKFSVDKLKFDKLYKMLTEIYTEDNFVKFFKVLNRKTYLNFDKAVFKINIVPKVNYTIYDGFNLRNTNLAANFNGQNTEINNMNFTKLKNFTGLFEFYKLLCVRGIITSKTKSLDKGYNKALNDLCIKVNNWDLFFSPSEDNFTNDLNKGEEITSDTNIEAAEENISLDLIQQYYLTFNFDNEPENISIENLSSDIIGQLELMPNIERFPNGKKYELDKYTMFHYLRAQEFEHGKSRIALTNSVNEALLNPSRVYTFFSSDYVKKVNKATEAAMFLGWVEQLVYDFTDETSEVSTTDKIADITIIIPYIGPALNIGNMLYKDDFVGALIFSGAVILLEFIPEIAIPVLGTFALVSYIANKVLTVQTIDNALSKRNEKWDEVYKYIVTNWLAKVNTQIDLIRKKMKEALENQAEATKAIINYQYNQYTEEEKNNINFNIDDLSSKLNESINKAMININKFLNQCSVSYLMNSMIPYGVKRLEDFDASLKDALLKYIYDNRGTLIGQVDRLKDKVNNTLSTDIPFQLSKYVDNQRLLSTFTEYIKNIINTSILNLRYESNHLIDLSRYASKINIGSKVNFDPIDKNQIQLFNLESSKIEVILKKAIVYNSMYENFSTSFWIRIPKYFKKISLNNEYTIINCMENNSGWKVSLNYGEIIWTLQDTKEIKQRVVFKYSQMINISDYINRWIFVTITNNRLNKSKIYINGRLIDQKPISNLGNIHASNKIMFKLDGCRDTHRYIWIKYFNLFDKELNEKEIKDLYDNQSNSGILKDFWGDYLQYDKPYYMLNLYDPNKYVDVNNVGIRGYMYLKGPRGSVGTTNIYLNSSLYRGTKFIIKKYASGNKDNIVRNNDRVYINVVVKNKEYRLATNASQAGVEKILSALEIPDVGNLSQVVVMKSKNDKGITNKCKMNLQDNNGNDIGFIGFHQFNNIAKLVASNWYNRQIERSSRTLGCSWEFIPVDDGWGERPL

SEQ ID NO: 23 - protein, 1296 aa, Artificial Sequence
  Modified BoNT/A1 (N954K, N930K, S955K, Q991K, N1026K, N1052K, Q1229K, M1144L) Polypeptide Sequence
MPFVNKQFNYKDPVNGVDIAYIKIPNAGQMQPVKAFKIHNKIWVIPERDTFTNPEEGDLNPPPEAKQVPVSYYDSTYLSTDNEKDNYLKGVTKLFERIYSTDLGRMLLTSIVRGIPFWGGSTIDTELKVIDTNCINVIQPDGSYRSEELNLVIIGPSADIIQFECKSFGHEVLNLTRNGYGSTQYIRFSPDFTFGFEESLEVDTNPLLGAGKFATDPAVTLAHELIHAGHRLYGIAINPNRVFKVNTNAYYEMSGLEVSFEELRTFGGHDAKFIDSLQENEFRLYYYNKFKDIASTLNKAKSIVGTTASLQYMKNVFKEKYLLSEDTSGKFSVDKLKFDKLYKMLTEIYTEDNFVKFFKVLNRKTYLNFDKAVFKINIVPKVNYTIYDGFNLRNTNLAANFNGQNTEINNMNFTKLKNFTGLFEFYKLLCVRGIITSKTKSLDKGYNKALNDLCIKVNNWDLFFSPSEDNFTNDLNKGEEITSDTNIEAAEENISLDLIQQYYLTFNFDNEPENISIENLSSDIIGQLELMPNIERFPNGKKYELDKYTMFHYLRAQEFEHGKSRIALTNSVNEALLNPSRVYTFFSSDYVKKVNKATEAAMFLGWVEQLVYDFTDETSEVSTTDKIADITIIIPYIGPALNIGNMLYKDDFVGALIFSGAVILLEFIPEIAIPVLGTFALVSYIANKVLTVQTIDNALSKRNEKWDEVYKYIVTNWLAKVNTQIDLIRKKMKEALENQAEATKAIINYQYNQYTEEEKNNINFNIDDLSSKLNESINKAMININKFLNQCSVSYLMNSMIPYGVKRLEDFDASLKDALLKYIYDNRGTLIGQVDRLKDKVNNTLSTDIPFQLSKYVDNQRLLSTFTEYIKNIINTSILNLRYESNHLIDLSRYASKINIGSKVNFDPIDKNQIQLFNLESSKIEVILKKAIVYNSMYENFSTSFWIRIPKYFKKISLNNEYTIINCMENNSGWKVSLNYGEIIWTLQDTKEIKQRVVFKYSQMINISDYINRWIFVTITNNRLNKSKIYINGRLIDQKPISNLGNIHASNKIMFKLDGCRDTHRYIWIKYFNLFDKELNEKEIKDLYDNQSNSGILKDFWGDYLQYDKPYYMLNLYDPNKYVDVNNVGIRGYMYLKGPRGSVLTTNIYLNSSLYRGTKFIIKKYASGNKDNIVRNNDRVYINVVVKNKEYRLATNASQAGVEKILSALEIPDVGNLSQVVVMKSKNDKGITNKCKMNLQDNNGNDIGFIGFHQFNNIAKLVASNWYNRQIERSSRTLGCSWEFIPVDDGWGERPL

SEQ ID NO: 24 - protein, 1296 aa, Artificial Sequence
  Modified BoNT/A1 (N954K, N930K, S955K, Q991K, N1026K, N1052K, Q1229K, M1144T) Polypeptide Sequence
MPFVNKQFNYKDPVNGVDIAYIKIPNAGQMQPVKAFKIHNKIWVIPERDTFTNPEEGDLNPPPEAKQVPVSYYDSTYLSTDNEKDNYLKGVTKLFERIYSTDLGRMLLTSIVRGIPFWGGSTIDTELKVIDTNCINVIQPDGSYRSEELNLVIIGPSADIIQFECKSFGHEVLNLTRNGYGSTQYIRFSPDFTFGFEESLEVDTNPLLGAGKFATDPAVTLAHELIHAGHRLYGIAINPNRVFKVNTNAYYEMSGLEVSFEELRTFGGHDAKFIDSLQENEFRLYYYNKFKDIASTLNKAKSIVGTTASLQYMKNVFKEKYLLSEDTSGKFSVDKLKFDKLYKMLTEIYTEDNFVKFFKVLNRKTYLNFDKAVFKINIVPKVNYTIYDGFNLRNTNLAANFNGQNTEINNMNFTKLKNFTGLFEFYKLLCVRGIITSKTKSLDKGYNKALNDLCIKVNNWDLFFSPSEDNFTNDLNKGEEITSDTNIEAAEENISLDLIQQYYLTFNFDNEPENISIENLSSDIIGQLELMPNIERFPNGKKYELDKYTMFHYLRAQEFEHGKSRIALTNSVNEALLNPSRVYTFFSSDYVKKVNKATEAAMFLGWVEQLVYDFTDETSEVSTTDKIADITIIIPYIGPALNIGNMLYKDDFVGALIFSGAVILLEFIPEIAIPVLGTFALVSYIANKVLTVQTIDNALSKRNEKWDEVYKYIVTNWLAKVNTQIDLIRKKMKEALENQAEATKAIINYQYNQYTEEEKNNINFNIDDLSSKLNESINKAMININKFLNQCSVSYLMNSMIPYGVKRLEDFDASLKDALLKYIYDNRGTLIGQVDRLKDKVNNTLSTDIPFQLSKYVDNQRLLSTFTEYIKNIINTSILNLRYESNHLIDLSRYASKINIGSKVNFDPIDKNQIQLFNLESSKIEVILKKAIVYNSMYENFSTSFWIRIPKYFKKISLNNEYTIINCMENNSGWKVSLNYGEIIWTLQDTKEIKQRVVFKYSQMINISDYINRWIFVTITNNRLNKSKIYINGRLIDQKPISNLGNIHASNKIMFKLDGCRDTHRYIWIKYFNLFDKELNEKEIKDLYDNQSNSGILKDFWGDYLQYDKPYYMLNLYDPNKYVDVNNVGIRGYMYLKGPRGSVTTTNIYLNSSLYRGTKFIIKKYASGNKDNIVRNNDRVYINVVVKNKEYRLATNASQAGVEKILSALEIPDVGNLSQVVVMKSKNDKGITNKCKMNLQDNNGNDIGFIGFHQFNNIAKLVASNWYNRQIERSSRTLGCSWEFIPVDDGWGERPL

SEQ ID NO: 25 - protein, 1296 aa, Artificial Sequence
  Modified BoNT/A1 (N954K, N930K, S955K, Q991K, N1026K, N1052K, Q1229K, M1144A) Polypeptide Sequence
MPFVNKQFNYKDPVNGVDIAYIKIPNAGQMQPVKAFKIHNKIWVIPERDTFTNPEEGDLNPPPEAKQVPVSYYDSTYLSTDNEKDNYLKGVTKLFERIYSTDLGRMLLTSIVRGIPFWGGSTIDTELKVIDTNCINVIQPDGSYRSEELNLVIIGPSADIIQFECKSFGHEVLNLTRNGYGSTQYIRFSPDFTFGFEESLEVDTNPLLGAGKFATDPAVTLAHELIHAGHRLYGIAINPNRVFKVNTNAYYEMSGLEVSFEELRTFGGHDAKFIDSLQENEFRLYYYNKFKDIASTLNKAKSIVGTTASLQYMKNVFKEKYLLSEDTSGKFSVDKLKFDKLYKMLTEIYTEDNFVKFFKVLNRKTYLNFDKAVFKINIVPKVNYTIYDGFNLRNTNLAANFNGQNTEINNMNFTKLKNFTGLFEFYKLLCVRGIITSKTKSLDKGYNKALNDLCIKVNNWDLFFSPSEDNFTNDLNKGEEITSDTNIEAAEENISLDLIQQYYLTFNFDNEPENISIENLSSDIIGQLELMPNIERFPNGKKYELDKYTMFHYLRAQEFEHGKSRIALTNSVNEALLNPSRVYTFFSSDYVKKVNKATEAAMFLGWVEQLVYDFTDETSEVSTTDKIADITIIIPYIGPALNIGNMLYKDDFVGALIFSGAVILLEFIPEIAIPVLGTFALVSYIANKVLTVQTIDNALSKRNEKWDEVYKYIVTNWLAKVNTQIDLIRKKMKEALENQAEATKAIINYQYNQYTEEEKNNINFNIDDLSSKLNESINKAMININKFLNQCSVSYLMNSMIPYGVKRLEDFDASLKDALLKYIYDNRGTLIGQVDRLKDKVNNTLSTDIPFQLSKYVDNQRLLSTFTEYIKNIINTSILNLRYESNHLIDLSRYASKINIGSKVNFDPIDKNQIQLFNLESSKIEVILKKAIVYNSMYENFSTSFWIRIPKYFKKISLNNEYTIINCMENNSGWKVSLNYGEIIWTLQDTKEIKQRVVFKYSQMINISDYINRWIFVTITNNRLNKSKIYINGRLIDQKPISNLGNIHASNKIMFKLDGCRDTHRYIWIKYFNLFDKELNEKEIKDLYDNQSNSGILKDFWGDYLQYDKPYYMLNLYDPNKYVDVNNVGIRGYMYLKGPRGSVATTNIYLNSSLYRGTKFIIKKYASGNKDNIVRNNDRVYINVVVKNKEYRLATNASQAGVEKILSALEIPDVGNLSQVVVMKSKNDKGITNKCKMNLQDNNGNDIGFIGFHQFNNIAKLVASNWYNRQIERSSRTLGCSWEFIPVDDGWGERPL

SEQ ID NO: 26 - protein, 1296 aa, Artificial Sequence
  Modified BoNT/A1 (N954K, N930K, S955K, Q991K, N1026K, N1052K, Q1229K, M1144I) Polypeptide Sequence
MPFVNKQFNYKDPVNGVDIAYIKIPNAGQMQPVKAFKIHNKIWVIPERDTFTNPEEGDLNPPPEAKQVPVSYYDSTYLSTDNEKDNYLKGVTKLFERIYSTDLGRMLLTSIVRGIPFWGGSTIDTELKVIDTNCINVIQPDGSYRSEELNLVIIGPSADIIQFECKSFGHEVLNLTRNGYGSTQYIRFSPDFTFGFEESLEVDTNPLLGAGKFATDPAVTLAHELIHAGHRLYGIAINPNRVFKVNTNAYYEMSGLEVSFEELRTFGGHDAKFIDSLQENEFRLYYYNKFKDIASTLNKAKSIVGTTASLQYMKNVFKEKYLLSEDTSGKFSVDKLKFDKLYKMLTEIYTEDNFVKFFKVLNRKTYLNFDKAVFKINIVPKVNYTIYDGFNLRNTNLAANFNGQNTEINNMNFTKLKNFTGLFEFYKLLCVRGIITSKTKSLDKGYNKALNDLCIKVNNWDLFFSPSEDNFTNDLNKGEEITSDTNIEAAEENISLDLIQQYYLTFNFDNEPENISIENLSSDIIGQLELMPNIERFPNGKKYELDKYTMFHYLRAQEFEHGKSRIALTNSVNEALLNPSRVYTFFSSDYVKKVNKATEAAMFLGWVEQLVYDFTDETSEVSTTDKIADITIIIPYIGPALNIGNMLYKDDFVGALIFSGAVILLEFIPEIAIPVLGTFALVSYIANKVLTVQTIDNALSKRNEKWDEVYKYIVTNWLAKVNTQIDLIRKKMKEALENQAEATKAIINYQYNQYTEEEKNNINFNIDDLSSKLNESINKAMININKFLNQCSVSYLMNSMIPYGVKRLEDFDASLKDALLKYIYDNRGTLIGQVDRLKDKVNNTLSTDIPFQLSKYVDNQRLLSTFTEYIKNIINTSILNLRYESNHLIDLSRYASKINIGSKVNFDPIDKNQIQLFNLESSKIEVILKKAIVYNSMYENFSTSFWIRIPKYFKKISLNNEYTIINCMENNSGWKVSLNYGEIIWTLQDTKEIKQRVVFKYSQMINISDYINRWIFVTITNNRLNKSKIYINGRLIDQKPISNLGNIHASNKIMFKLDGCRDTHRYIWIKYFNLFDKELNEKEIKDLYDNQSNSGILKDFWGDYLQYDKPYYMLNLYDPNKYVDVNNVGIRGYMYLKGPRGSVITTNIYLNSSLYRGTKFIIKKYASGNKDNIVRNNDRVYINVVVKNKEYRLATNASQAGVEKILSALEIPDVGNLSQVVVMKSKNDKGITNKCKMNLQDNNGNDIGFIGFHQFNNIAKLVASNWYNRQIERSSRTLGCSWEFIPVDDGWGERPL

SEQ ID NO: 27 - protein, 1295 aa, Artificial Sequence
  Modified BoNT/A1 (N954K, N930K, S955K, Q991K, N1026K, N1052K, Q1229K, M1144 Deletion) Polypeptide Sequence
MPFVNKQFNYKDPVNGVDIAYIKIPNAGQMQPVKAFKIHNKIWVIPERDTFTNPEEGDLNPPPEAKQVPVSYYDSTYLSTDNEKDNYLKGVTKLFERIYSTDLGRMLLTSIVRGIPFWGGSTIDTELKVIDTNCINVIQPDGSYRSEELNLVIIGPSADIIQFECKSFGHEVLNLTRNGYGSTQYIRFSPDFTFGFEESLEVDTNPLLGAGKFATDPAVTLAHELIHAGHRLYGIAINPNRVFKVNTNAYYEMSGLEVSFEELRTFGGHDAKFIDSLQENEFRLYYYNKFKDIASTLNKAKSIVGTTASLQYMKNVFKEKYLLSEDTSGKFSVDKLKFDKLYKMLTEIYTEDNFVKFFKVLNRKTYLNFDKAVFKINIVPKVNYTIYDGFNLRNTNLAANFNGQNTEINNMNFTKLKNFTGLFEFYKLLCVRGIITSKTKSLDKGYNKALNDLCIKVNNWDLFFSPSEDNFTNDLNKGEEITSDTNIEAAEENISLDLIQQYYLTFNFDNEPENISIENLSSDIIGQLELMPNIERFPNGKKYELDKYTMFHYLRAQEFEHGKSRIALTNSVNEALLNPSRVYTFFSSDYVKKVNKATEAAMFLGWVEQLVYDFTDETSEVSTTDKIADITIIIPYIGPALNIGNMLYKDDFVGALIFSGAVILLEFIPEIAIPVLGTFALVSYIANKVLTVQTIDNALSKRNEKWDEVYKYIVTNWLAKVNTQIDLIRKKMKEALENQAEATKAIINYQYNQYTEEEKNNINFNIDDLSSKLNESINKAMININKFLNQCSVSYLMNSMIPYGVKRLEDFDASLKDALLKYIYDNRGTLIGQVDRLKDKVNNTLSTDIPFQLSKYVDNQRLLSTFTEYIKNIINTSILNLRYESNHLIDLSRYASKINIGSKVNFDPIDKNQIQLFNLESSKIEVILKKAIVYNSMYENFSTSFWIRIPKYFKKISLNNEYTIINCMENNSGWKVSLNYGEIIWTLQDTKEIKQRVVFKYSQMINISDYINRWIFVTITNNRLNKSKIYINGRLIDQKPISNLGNIHASNKIMFKLDGCRDTHRYIWIKYFNLFDKELNEKEIKDLYDNQSNSGILKDFWGDYLQYDKPYYMLNLYDPNKYVDVNNVGIRGYMYLKGPRGSVTTNIYLNSSLYRGTKFIIKKYASGNKDNIVRNNDRVYINVVVKNKEYRLATNASQAGVEKILSALEIPDVGNLSQVVVMKSKNDKGITNKCKMNLQDNNGNDIGFIGFHQFNNIAKLVASNWYNRQIERSSRTLGCSWEFIPVDDGWGERPL

SEQ ID NO: 28 - DNA, 3888 bp, Artificial Sequence
  BoNT/A1 (N930K, S955K, Q991K, N1026K, N1052K, Q1229K, N1025K) Nucleic Acid Sequence
atgccattcgtcaacaagcaattcaactacaaagacccagtcaacggcgtcgacatcgcatacatcaagattccgaacgccggtcaaatgcagccggttaaggcttttaagatccacaacaagatttgggttatcccggagcgtgacaccttcacgaacccggaagaaggcgatctgaacccgccaccggaagcgaagcaagtccctgtcagctactacgattcgacgtacctgagcacggataacgaaaaagataactacctgaaaggtgtgaccaagctgttcgaacgtatctacagcacggatctgggtcgcatgctgctgactagcattgttcgcggtatcccgttctggggtggtagcacgattgacaccgaactgaaggttatcgacactaactgcattaacgttattcaaccggatggtagctatcgtagcgaagagctgaatctggtcatcattggcccgagcgcagacattatccaattcgagtgcaagagctttggtcacgaggttctgaatctgacccgcaatggctatggtagcacccagtacattcgtttttcgccggattttaccttcggctttgaagagagcctggaggttgataccaatccgttgctgggtgcgggcaaattcgctaccgatccggctgtcacgctggcccatgaactgatccacgcaggccaccgcctgtacggcattgccatcaacccaaaccgtgtgttcaaggttaatacgaatgcatactacgagatgagcggcctggaagtcagcttcgaagaactgcgcaccttcggtggccatgacgctaaattcattgacagcttgcaagagaatgagttccgtctgtactactataacaaattcaaagacattgcaagcacgttgaacaaggccaaaagcatcgttggtactaccgcgtcgttgcagtatatgaagaatgtgtttaaagagaagtacctgctgtccgaggatacctccggcaagtttagcgttgataagctgaagtttgacaaactgtacaagatgctgaccgagatttacaccgaggacaactttgtgaaattcttcaaagtgttgaatcgtaaaacctatctgaattttgacaaagcggttttcaagattaacatcgtgccgaaggtgaactacaccatctatgacggttttaacctgcgtaacaccaacctggcggcgaactttaacggtcagaatacggaaatcaacaacatgaatttcacgaagttgaagaacttcacgggtctgttcgagttctataagctgctgtgcgtgcgcggtatcatcaccagcaaaaccaaaagcctggacaaaggctacaacaaggcgctgaatgacctgtgcattaaggtaaacaattgggatctgttcttttcgccatccgaagataattttaccaacgacctgaacaagggtgaagaaatcaccagcgatacgaatattgaagcagcggaagagaatatcagcctggatctgatccagcagtactatctgacctttaacttcgacaatgaaccggagaacattagcattgagaatctgagcagcgacattatcggtcagctggaactgatgccgaatatcgaacgtttcccgaacggcaaaaagtacgagctggacaagtacactatgttccattacctgcgtgcacaggagtttgaacacggtaaaagccgtatcgcgctgaccaacagcgttaacgaggccctgctgaacccgagccgtgtctataccttcttcagcagcgactatgttaagaaagtgaacaaagccactgaggccgcgatgttcctgggctgggtggaacagctggtatatgacttcacggacgagacgagcgaagtgagcactaccgacaaaattgctgatattaccatcattatcccgtatattggtccggcactgaacattggcaacatgctgtacaaagacgattttgtgggtgccctgatcttctccggtgccgtgattctgctggagttcattccggagattgcgatcccggtgttgggtaccttcgcgctggtgtcctacatcgcgaataaggttctgacggttcagaccatcgataacgcgctgtcgaaacgtaatgaaaaatgggacgaggtttacaaatacattgttacgaattggctggcgaaagtcaatacccagatcgacctgatccgtaagaaaatgaaagaggcgctggagaatcaggcggaggccaccaaagcaattatcaactaccaatacaaccagtacacggaagaagagaagaataacattaacttcaatatcgatgatttgagcagcaagctgaatgaatctatcaacaaagcgatgatcaatatcaacaagtttttgaatcagtgtagcgtttcgtacctgatgaatagcatgattccgtatggcgtcaaacgtctggaggacttcgacgccagcctgaaagatgcgttgctgaaatacatttacgacaatcgtggtacgctgattggccaagttgaccgcttgaaagacaaagttaacaataccctgagcaccgacatcccatttcaactgagcaagtatgttgataatcaacgtctgttgagcactttcaccgagtatatcaaaaacatcatcaatactagcattctgaacctgcgttacgagagcaatcatctgattgatctgagccgttatgctagcaagatcaacatcggtagcaaggtcaattttgacccgatcgataagaaccagatccagctgtttaatctggaatcgagcaaaattgaggttatcctgaaaaaggccattgtctacaactccatgtacgagaatttctccaccagcttctggattcgcatcccgaaatacttcaacaagattagcctgaacaacgagtatactatcatcaactgtatggagaacaacagcggttggaaggtgtctctgaactatggtgagatcatttggaccttgcaggacaccaaagagatcaagcagcgcgtcgtgttcaagtactctcaaatgatcaacatttccgattacattaatcgttggatcttcgtgaccattacgaataaccgtctgaagaagagcaagatttacatcaatggtcgcttgatcgatcagaaaccgattagcaacctgggtaatatccacgcaagcaacaagattatgttcaaattggacggttgccgcgatacccatcgttatatctggatcaagtatttcaacctgtttgataaagaactgaatgagaaggagatcaaagatttgtatgacaaccaatctaacagcggcattttgaaggacttctggggcgattatctgcaatacgataagccgtactatatgctgaacctgtatgatccgaacaaatatgtggatgtcaataatgtgggtattcgtggttacatgtatttgaagggtccgcgtggcagcgttatgacgaccaacatttacctgaactctagcctgtaccgtggtacgaaattcatcattaagaaatatgccagcggcaacaaagataacattgtgcgtaataacgatcgtgtctacatcaacgtggtcgtgaagaataaagagtaccgtctggcgaccaacgcttcgcaggcgggtgttgagaaaattctgagcgcgttggagatccctgatgtcggtaatctgagccaagtcgtggttatgaagagcaagaacgacaagggtatcactaacaagtgcaagatgaacctgcaagacaacaatggtaacgacatcggctttattggtttccaccagttcaacaatattgctaaactggtagcgagcaattggtacaatcgtcagattgagcgcagcagccgtactttgggctgtagctgggagtttatcccggtcgatgatggttggggcgaacgtccgctg

SEQ ID NO: 29 - protein, 1296 aa, Artificial Sequence
  BoNT/A1 (N930K, S955K, Q991K, N1026K, N1052K, Q1229K, N1025K) Polypeptide Sequence
MPFVNKQFNYKDPVNGVDIAYIKIPNAGQMQPVKAFKIHNKIWVIPERDTFTNPEEGDLNPPPEAKQVPVSYYDSTYLSTDNEKDNYLKGVTKLFERIYSTDLGRMLLTSIVRGIPFWGGSTIDTELKVIDTNCINVIQPDGSYRSEELNLVIIGPSADIIQFECKSFGHEVLNLTRNGYGSTQYIRFSPDFTFGFEESLEVDTNPLLGAGKFATDPAVTLAHELIHAGHRLYGIAINPNRVFKVNTNAYYEMSGLEVSFEELRTFGGHDAKFIDSLQENEFRLYYYNKFKDIASTLNKAKSIVGTTASLQYMKNVFKEKYLLSEDTSGKFSVDKLKFDKLYKMLTEIYTEDNFVKFFKVLNRKTYLNFDKAVFKINIVPKVNYTIYDGFNLRNTNLAANFNGQNTEINNMNFTKLKNFTGLFEFYKLLCVRGIITSKTKSLDKGYNKALNDLCIKVNNWDLFFSPSEDNFTNDLNKGEEITSDTNIEAAEENISLDLIQQYYLTFNFDNEPENISIENLSSDIIGQLELMPNIERFPNGKKYELDKYTMFHYLRAQEFEHGKSRIALTNSVNEALLNPSRVYTFFSSDYVKKVNKATEAAMFLGWVEQLVYDFTDETSEVSTTDKIADITIIIPYIGPALNIGNMLYKDDFVGALIFSGAVILLEFIPEIAIPVLGTFALVSYIANKVLTVQTIDNALSKRNEKWDEVYKYIVTNWLAKVNTQIDLIRKKMKEALENQAEATKAIINYQYNQYTEEEKNNINFNIDDLSSKLNESINKAMININKFLNQCSVSYLMNSMIPYGVKRLEDFDASLKDALLKYIYDNRGTLIGQVDRLKDKVNNTLSTDIPFQLSKYVDNQRLLSTFTEYIKNIINTSILNLRYESNHLIDLSRYASKINIGSKVNFDPIDKNQIQLFNLESSKIEVILKKAIVYNSMYENFSTSFWIRIPKYFNKISLNNEYTIINCMENNSGWKVSLNYGEIIWTLQDTKEIKQRVVFKYSQMINISDYINRWIFVTITNNRLKKSKIYINGRLIDQKPISNLGNIHASNKIMFKLDGCRDTHRYIWIKYFNLFDKELNEKEIKDLYDNQSNSGILKDFWGDYLQYDKPYYMLNLYDPNKYVDVNNVGIRGYMYLKGPRGSVMTTNIYLNSSLYRGTKFIIKKYASGNKDNIVRNNDRVYINVVVKNKEYRLATNASQAGVEKILSALEIPDVGNLSQVVVMKSKNDKGITNKCKMNLQDNNGNDIGFIGFHQFNNIAKLVASNWYNRQIERSSRTLGCSWEFIPVDDGWGERPL

SEQ ID NO: 30 - protein, 1296 aa, Artificial Sequence
  Modified BoNT/A1 (N930K, S955K, Q991K, N1026K, N1052K, Q1229K, N1025K, M1144V) Polypeptide Sequence
MPFVNKQFNYKDPVNGVDIAYIKIPNAGQMQPVKAFKIHNKIWVIPERDTFTNPEEGDLNPPPEAKQVPVSYYDSTYLSTDNEKDNYLKGVTKLFERIYSTDLGRMLLTSIVRGIPFWGGSTIDTELKVIDTNCINVIQPDGSYRSEELNLVIIGPSADIIQFECKSFGHEVLNLTRNGYGSTQYIRFSPDFTFGFEESLEVDTNPLLGAGKFATDPAVTLAHELIHAGHRLYGIAINPNRVFKVNTNAYYEMSGLEVSFEELRTFGGHDAKFIDSLQENEFRLYYYNKFKDIASTLNKAKSIVGTTASLQYMKNVFKEKYLLSEDTSGKFSVDKLKFDKLYKMLTEIYTEDNFVKFFKVLNRKTYLNFDKAVFKINIVPKVNYTIYDGFNLRNTNLAANFNGQNTEINNMNFTKLKNFTGLFEFYKLLCVRGIITSKTKSLDKGYNKALNDLCIKVNNWDLFFSPSEDNFTNDLNKGEEITSDTNIEAAEENISLDLIQQYYLTFNFDNEPENISIENLSSDIIGQLELMPNIERFPNGKKYELDKYTMFHYLRAQEFEHGKSRIALTNSVNEALLNPSRVYTFFSSDYVKKVNKATEAAMFLGWVEQLVYDFTDETSEVSTTDKIADITIIIPYIGPALNIGNMLYKDDFVGALIFSGAVILLEFIPEIAIPVLGTFALVSYIANKVLTVQTIDNALSKRNEKWDEVYKYIVTNWLAKVNTQIDLIRKKMKEALENQAEATKAIINYQYNQYTEEEKNNINFNIDDLSSKLNESINKAMININKFLNQCSVSYLMNSMIPYGVKRLEDFDASLKDALLKYIYDNRGTLIGQVDRLKDKVNNTLSTDIPFQLSKYVDNQRLLSTFTEYIKNIINTSILNLRYESNHLIDLSRYASKINIGSKVNFDPIDKNQIQLFNLESSKIEVILKKAIVYNSMYENFSTSFWIRIPKYFNKISLNNEYTIINCMENNSGWKVSLNYGEIIWTLQDTKEIKQRVVFKYSQMINISDYINRWIFVTITNNRLKKSKIYINGRLIDQKPISNLGNIHASNKIMFKLDGCRDTHRYIWIKYFNLFDKELNEKEIKDLYDNQSNSGILKDFWGDYLQYDKPYYMLNLYDPNKYVDVNNVGIRGYMYLKGPRGSVVTTNIYLNSSLYRGTKFIIKKYASGNKDNIVRNNDRVYINVVVKNKEYRLATNASQAGVEKILSALEIPDVGNLSQVVVMKSKNDKGITNKCKMNLQDNNGNDIGFIGFHQFNNIAKLVASNWYNRQIERSSRTLGCSWEFIPVDDGWGERPL

SEQ ID NO: 31 - protein, 1296 aa, Artificial Sequence
  Modified BoNT/A1 (N930K, S955K, Q991K, N1026K, N1052K, Q1229K, N1025K, M1144G) Polypeptide Sequence
MPFVNKQFNYKDPVNGVDIAYIKIPNAGQMQPVKAFKIHNKIWVIPERDTFTNPEEGDLNPPPEAKQVPVSYYDSTYLSTDNEKDNYLKGVTKLFERIYSTDLGRMLLTSIVRGIPFWGGSTIDTELKVIDTNCINVIQPDGSYRSEELNLVIIGPSADIIQFECKSFGHEVLNLTRNGYGSTQYIRFSPDFTFGFEESLEVDTNPLLGAGKFATDPAVTLAHELIHAGHRLYGIAINPNRVFKVNTNAYYEMSGLEVSFEELRTFGGHDAKFIDSLQENEFRLYYYNKFKDIASTLNKAKSIVGTTASLQYMKNVFKEKYLLSEDTSGKFSVDKLKFDKLYKMLTEIYTEDNFVKFFKVLNRKTYLNFDKAVFKINIVPKVNYTIYDGFNLRNTNLAANFNGQNTEINNMNFTKLKNFTGLFEFYKLLCVRGIITSKTKSLDKGYNKALNDLCIKVNNWDLFFSPSEDNFTNDLNKGEEITSDTNIEAAEENISLDLIQQYYLTFNFDNEPENISIENLSSDIIGQLELMPNIERFPNGKKYELDKYTMFHYLRAQEFEHGKSRIALTNSVNEALLNPSRVYTFFSSDYVKKVNKATEAAMFLGWVEQLVYDFTDETSEVSTTDKIADITIIIPYIGPALNIGNMLYKDDFVGALIFSGAVILLEFIPEIAIPVLGTFALVSYIANKVLTVQTIDNALSKRNEKWDEVYKYIVTNWLAKVNTQIDLIRKKMKEALENQAEATKAIINYQYNQYTEEEKNNINFNIDDLSSKLNESINKAMININKFLNQCSVSYLMNSMIPYGVKRLEDFDASLKDALLKYIYDNRGTLIGQVDRLKDKVNNTLSTDIPFQLSKYVDNQRLLSTFTEYIKNIINTSILNLRYESNHLIDLSRYASKINIGSKVNFDPIDKNQIQLFNLESSKIEVILKKAIVYNSMYENFSTSFWIRIPKYFNKISLNNEYTIINCMENNSGWKVSLNYGEIIWTLQDTKEIKQRVVFKYSQMINISDYINRWIFVTITNNRLKKSKIYINGRLIDQKPISNLGNIHASNKIMFKLDGCRDTHRYIWIKYFNLFDKELNEKEIKDLYDNQSNSGILKDFWGDYLQYDKPYYMLNLYDPNKYVDVNNVGIRGYMYLKGPRGSVGTTNIYLNSSLYRGTKFIIKKYASGNKDNIVRNNDRVYINVVVKNKEYRLATNASQAGVEKILSALEIPDVGNLSQVVVMKSKNDKGITNKCKMNLQDNNGNDIGFIGFHQFNNIAKLVASNWYNRQIERSSRTLGCSWEFIPVDDGWGERPL

SEQ ID NO: 32 - protein, 1296 aa, Artificial Sequence
  Modified BoNT/A1 (N930K, S955K, Q991K, N1026K, N1052K, Q1229K, N1025K, M1144L) Polypeptide Sequence
MPFVNKQFNYKDPVNGVDIAYIKIPNAGQMQPVKAFKIHNKIWVIPERDTFTNPEEGDLNPPPEAKQVPVSYYDSTYLSTDNEKDNYLKGVTKLFERIYSTDLGRMLLTSIVRGIPFWGGSTIDTELKVIDTNCINVIQPDGSYRSEELNLVIIGPSADIIQFECKSFGHEVLNLTRNGYGSTQYIRFSPDFTFGFEESLEVDTNPLLGAGKFATDPAVTLAHELIHAGHRLYGIAINPNRVFKVNTNAYYEMSGLEVSFEELRTFGGHDAKFIDSLQENEFRLYYYNKFKDIASTLNKAKSIVGTTASLQYMKNVFKEKYLLSEDTSGKFSVDKLKFDKLYKMLTEIYTEDNFVKFFKVLNRKTYLNFDKAVFKINIVPKVNYTIYDGFNLRNTNLAANFNGQNTEINNMNFTKLKNFTGLFEFYKLLCVRGIITSKTKSLDKGYNKALNDLCIKVNNWDLFFSPSEDNFTNDLNKGEEITSDTNIEAAEENISLDLIQQYYLTFNFDNEPENISIENLSSDIIGQLELMPNIERFPNGKKYELDKYTMFHYLRAQEFEHGKSRIALTNSVNEALLNPSRVYTFFSSDYVKKVNKATEAAMFLGWVEQLVYDFTDETSEVSTTDKIADITIIIPYIGPALNIGNMLYKDDFVGALIFSGAVILLEFIPEIAIPVLGTFALVSYIANKVLTVQTIDNALSKRNEKWDEVYKYIVTNWLAKVNTQIDLIRKKMKEALENQAEATKAIINYQYNQYTEEEKNNINFNIDDLSSKLNESINKAMININKFLNQCSVSYLMNSMIPYGVKRLEDFDASLKDALLKYIYDNRGTLIGQVDRLKDKVNNTLSTDIPFQLSKYVDNQRLLSTFTEYIKNIINTSILNLRYESNHLIDLSRYASKINIGSKVNFDPIDKNQIQLFNLESSKIEVILKKAIVYNSMYENFSTSFWIRIPKYFNKISLNNEYTIINCMENNSGWKVSLNYGEIIWTLQDTKEIKQRVVFKYSQMINISDYINRWIFVTITNNRLKKSKIYINGRLIDQKPISNLGNIHASNKIMFKLDGCRDTHRYIWIKYFNLFDKELNEKEIKDLYDNQSNSGILKDFWGDYLQYDKPYYMLNLYDPNKYVDVNNVGIRGYMYLKGPRGSVLTTNIYLNSSLYRGTKFIIKKYASGNKDNIVRNNDRVYINVVVKNKEYRLATNASQAGVEKILSALEIPDVGNLSQVVVMKSKNDKGITNKCKMNLQDNNGNDIGFIGFHQFNNIAKLVASNWYNRQIERSSRTLGCSWEFIPVDDGWGERPL

SEQ ID NO: 33 - protein, 1296 aa, Artificial Sequence
  Modified BoNT/A1 (N930K, S955K, Q991K, N1026K, N1052K, Q1229K, N1025K, M1144T) Polypeptide Sequence
MPFVNKQFNYKDPVNGVDIAYIKIPNAGQMQPVKAFKIHNKIWVIPERDTFTNPEEGDLNPPPEAKQVPVSYYDSTYLSTDNEKDNYLKGVTKLFERIYSTDLGRMLLTSIVRGIPFWGGSTIDTELKVIDTNCINVIQPDGSYRSEELNLVIIGPSADIIQFECKSFGHEVLNLTRNGYGSTQYIRFSPDFTFGFEESLEVDTNPLLGAGKFATDPAVTLAHELIHAGHRLYGIAINPNRVFKVNTNAYYEMSGLEVSFEELRTFGGHDAKFIDSLQENEFRLYYYNKFKDIASTLNKAKSIVGTTASLQYMKNVFKEKYLLSEDTSGKFSVDKLKFDKLYKMLTEIYTEDNFVKFFKVLNRKTYLNFDKAVFKINIVPKVNYTIYDGFNLRNTNLAANFNGQNTEINNMNFTKLKNFTGLFEFYKLLCVRGIITSKTKSLDKGYNKALNDLCIKVNNWDLFFSPSEDNFTNDLNKGEEITSDTNIEAAEENISLDLIQQYYLTFNFDNEPENISIENLSSDIIGQLELMPNIERFPNGKKYELDKYTMFHYLRAQEFEHGKSRIALTNSVNEALLNPSRVYTFFSSDYVKKVNKATEAAMFLGWVEQLVYDFTDETSEVSTTDKIADITIIIPYIGPALNIGNMLYKDDFVGALIFSGAVILLEFIPEIAIPVLGTFALVSYIANKVLTVQTIDNALSKRNEKWDEVYKYIVTNWLAKVNTQIDLIRKKMKEALENQAEATKAIINYQYNQYTEEEKNNINFNIDDLSSKLNESINKAMININKFLNQCSVSYLMNSMIPYGVKRLEDFDASLKDALLKYIYDNRGTLIGQVDRLKDKVNNTLSTDIPFQLSKYVDNQRLLSTFTEYIKNIINTSILNLRYESNHLIDLSRYASKINIGSKVNFDPIDKNQIQLFNLESSKIEVILKKAIVYNSMYENFSTSFWIRIPKYFNKISLNNEYTIINCMENNSGWKVSLNYGEIIWTLQDTKEIKQRVVFKYSQMINISDYINRWIFVTITNNRLKKSKIYINGRLIDQKPISNLGNIHASNKIMFKLDGCRDTHRYIWIKYFNLFDKELNEKEIKDLYDNQSNSGILKDFWGDYLQYDKPYYMLNLYDPNKYVDVNNVGIRGYMYLKGPRGSVTTTNIYLNSSLYRGTKFIIKKYASGNKDNIVRNNDRVYINVVVKNKEYRLATNASQAGVEKILSALEIPDVGNLSQVVVMKSKNDKGITNKCKMNLQDNNGNDIGFIGFHQFNNIAKLVASNWYNRQIERSSRTLGCSWEFIPVDDGWGERPL

SEQ ID NO: 34 - protein, 1296 aa, Artificial Sequence
  Modified BoNT/A1 (N930K, S955K, Q991K, N1026K, N1052K, Q1229K, N1025K, M1144A) Polypeptide Sequence
MPFVNKQFNYKDPVNGVDIAYIKIPNAGQMQPVKAFKIHNKIWVIPERDTFTNPEEGDLNPPPEAKQVPVSYYDSTYLSTDNEKDNYLKGVTKLFERIYSTDLGRMLLTSIVRGIPFWGGSTIDTELKVIDTNCINVIQPDGSYRSEELNLVIIGPSADIIQFECKSFGHEVLNLTRNGYGSTQYIRFSPDFTFGFEESLEVDTNPLLGAGKFATDPAVTLAHELIHAGHRLYGIAINPNRVFKVNTNAYYEMSGLEVSFEELRTFGGHDAKFIDSLQENEFRLYYYNKFKDIASTLNKAKSIVGTTASLQYMKNVFKEKYLLSEDTSGKFSVDKLKFDKLYKMLTEIYTEDNFVKFFKVLNRKTYLNFDKAVFKINIVPKVNYTIYDGFNLRNTNLAANFNGQNTEINNMNFTKLKNFTGLFEFYKLLCVRGIITSKTKSLDKGYNKALNDLCIKVNNWDLFFSPSEDNFTNDLNKGEEITSDTNIEAAEENISLDLIQQYYLTFNFDNEPENISIENLSSDIIGQLELMPNIERFPNGKKYELDKYTMFHYLRAQEFEHGKSRIALTNSVNEALLNPSRVYTFFSSDYVKKVNKATEAAMFLGWVEQLVYDFTDETSEVSTTDKIADITIIIPYIGPALNIGNMLYKDDFVGALIFSGAVILLEFIPEIAIPVLGTFALVSYIANKVLTVQTIDNALSKRNEKWDEVYKYIVTNWLAKVNTQIDLIRKKMKEALENQAEATKAIINYQYNQYTEEEKNNINFNIDDLSSKLNESINKAMININKFLNQCSVSYLMNSMIPYGVKRLEDFDASLKDALLKYIYDNRGTLIGQVDRLKDKVNNTLSTDIPFQLSKYVDNQRLLSTFTEYIKNIINTSILNLRYESNHLIDLSRYASKINIGSKVNFDPIDKNQIQLFNLESSKIEVILKKAIVYNSMYENFSTSFWIRIPKYFNKISLNNEYTIINCMENNSGWKVSLNYGEIIWTLQDTKEIKQRVVFKYSQMINISDYINRWIFVTITNNRLKKSKIYINGRLIDQKPISNLGNIHASNKIMFKLDGCRDTHRYIWIKYFNLFDKELNEKEIKDLYDNQSNSGILKDFWGDYLQYDKPYYMLNLYDPNKYVDVNNVGIRGYMYLKGPRGSVATTNIYLNSSLYRGTKFIIKKYASGNKDNIVRNNDRVYINVVVKNKEYRLATNASQAGVEKILSALEIPDVGNLSQVVVMKSKNDKGITNKCKMNLQDNNGNDIGFIGFHQFNNIAKLVASNWYNRQIERSSRTLGCSWEFIPVDDGWGERPL

SEQ ID NO: 35 - protein, 1296 aa, Artificial Sequence
  Modified BoNT/A1 (N930K, S955K, Q991K, N1026K, N1052K, Q1229K, N1025K, M1144I) Polypeptide Sequence
MPFVNKQFNYKDPVNGVDIAYIKIPNAGQMQPVKAFKIHNKIWVIPERDTFTNPEEGDLNPPPEAKQVPVSYYDSTYLSTDNEKDNYLKGVTKLFERIYSTDLGRMLLTSIVRGIPFWGGSTIDTELKVIDTNCINVIQPDGSYRSEELNLVIIGPSADIIQFECKSFGHEVLNLTRNGYGSTQYIRFSPDFTFGFEESLEVDTNPLLGAGKFATDPAVTLAHELIHAGHRLYGIAINPNRVFKVNTNAYYEMSGLEVSFEELRTFGGHDAKFIDSLQENEFRLYYYNKFKDIASTLNKAKSIVGTTASLQYMKNVFKEKYLLSEDTSGKFSVDKLKFDKLYKMLTEIYTEDNFVKFFKVLNRKTYLNFDKAVFKINIVPKVNYTIYDGFNLRNTNLAANFNGQNTEINNMNFTKLKNFTGLFEFYKLLCVRGIITSKTKSLDKGYNKALNDLCIKVNNWDLFFSPSEDNFTNDLNKGEEITSDTNIEAAEENISLDLIQQYYLTFNFDNEPENISIENLSSDIIGQLELMPNIERFPNGKKYELDKYTMFHYLRAQEFEHGKSRIALTNSVNEALLNPSRVYTFFSSDYVKKVNKATEAAMFLGWVEQLVYDFTDETSEVSTTDKIADITIIIPYIGPALNIGNMLYKDDFVGALIFSGAVILLEFIPEIAIPVLGTFALVSYIANKVLTVQTIDNALSKRNEKWDEVYKYIVTNWLAKVNTQIDLIRKKMKEALENQAEATKAIINYQYNQYTEEEKNNINFNIDDLSSKLNESINKAMININKFLNQCSVSYLMNSMIPYGVKRLEDFDASLKDALLKYIYDNRGTLIGQVDRLKDKVNNTLSTDIPFQLSKYVDNQRLLSTFTEYIKNIINTSILNLRYESNHLIDLSRYASKINIGSKVNFDPIDKNQIQLFNLESSKIEVILKKAIVYNSMYENFSTSFWIRIPKYFNKISLNNEYTIINCMENNSGWKVSLNYGEIIWTLQDTKEIKQRVVFKYSQMINISDYINRWIFVTITNNRLKKSKIYINGRLIDQKPISNLGNIHASNKIMFKLDGCRDTHRYIWIKYFNLFDKELNEKEIKDLYDNQSNSGILKDFWGDYLQYDKPYYMLNLYDPNKYVDVNNVGIRGYMYLKGPRGSVITTNIYLNSSLYRGTKFIIKKYASGNKDNIVRNNDRVYINVVVKNKEYRLATNASQAGVEKILSALEIPDVGNLSQVVVMKSKNDKGITNKCKMNLQDNNGNDIGFIGFHQFNNIAKLVASNWYNRQIERSSRTLGCSWEFIPVDDGWGERPL

SEQ ID NO: 36 - protein, 1295 aa, Artificial Sequence
  Modified BoNT/A1 (N930K, S955K, Q991K, N1026K, N1052K, Q1229K, N1025K, M1144 Deletion) Polypeptide Sequence
MPFVNKQFNYKDPVNGVDIAYIKIPNAGQMQPVKAFKIHNKIWVIPERDTFTNPEEGDLNPPPEAKQVPVSYYDSTYLSTDNEKDNYLKGVTKLFERIYSTDLGRMLLTSIVRGIPFWGGSTIDTELKVIDTNCINVIQPDGSYRSEELNLVIIGPSADIIQFECKSFGHEVLNLTRNGYGSTQYIRFSPDFTFGFEESLEVDTNPLLGAGKFATDPAVTLAHELIHAGHRLYGIAINPNRVFKVNTNAYYEMSGLEVSFEELRTFGGHDAKFIDSLQENEFRLYYYNKFKDIASTLNKAKSIVGTTASLQYMKNVFKEKYLLSEDTSGKFSVDKLKFDKLYKMLTEIYTEDNFVKFFKVLNRKTYLNFDKAVFKINIVPKVNYTIYDGFNLRNTNLAANFNGQNTEINNMNFTKLKNFTGLFEFYKLLCVRGIITSKTKSLDKGYNKALNDLCIKVNNWDLFFSPSEDNFTNDLNKGEEITSDTNIEAAEENISLDLIQQYYLTFNFDNEPENISIENLSSDIIGQLELMPNIERFPNGKKYELDKYTMFHYLRAQEFEHGKSRIALTNSVNEALLNPSRVYTFFSSDYVKKVNKATEAAMFLGWVEQLVYDFTDETSEVSTTDKIADITIIIPYIGPALNIGNMLYKDDFVGALIFSGAVILLEFIPEIAIPVLGTFALVSYIANKVLTVQTIDNALSKRNEKWDEVYKYIVTNWLAKVNTQIDLIRKKMKEALENQAEATKAIINYQYNQYTEEEKNNINFNIDDLSSKLNESINKAMININKFLNQCSVSYLMNSMIPYGVKRLEDFDASLKDALLKYIYDNRGTLIGQVDRLKDKVNNTLSTDIPFQLSKYVDNQRLLSTFTEYIKNIINTSILNLRYESNHLIDLSRYASKINIGSKVNFDPIDKNQIQLFNLESSKIEVILKKAIVYNSMYENFSTSFWIRIPKYFNKISLNNEYTIINCMENNSGWKVSLNYGEIIWTLQDTKEIKQRVVFKYSQMINISDYINRWIFVTITNNRLKKSKIYINGRLIDQKPISNLGNIHASNKIMFKLDGCRDTHRYIWIKYFNLFDKELNEKEIKDLYDNQSNSGILKDFWGDYLQYDKPYYMLNLYDPNKYVDVNNVGIRGYMYLKGPRGSVTTNIYLNSSLYRGTKFIIKKYASGNKDNIVRNNDRVYINVVVKNKEYRLATNASQAGVEKILSALEIPDVGNLSQVVVMKSKNDKGITNKCKMNLQDNNGNDIGFIGFHQFNNIAKLVASNWYNRQIERSSRTLGCSWEFIPVDDGWGERPL

SEQ ID NO: 37 - DNA, 3888 bp, Artificial Sequence
  BoNT/A1 (N1188R, D1213R, G1215R, N1216R, N1242R, N1243R, S1274R, T1277R) Nucleic Acid Sequence
atgccattcgtcaacaagcaattcaactacaaagacccagtcaacggcgtcgacatcgcatacatcaagattccgaacgccggtcaaatgcagccggttaaggcttttaagatccacaacaagatttgggttatcccggagcgtgacaccttcacgaacccggaagaaggcgatctgaacccgccaccggaagcgaagcaagtccctgtcagctactacgattcgacgtacctgagcacggataacgaaaaagataactacctgaaaggtgtgaccaagctgttcgaacgtatctacagcacggatctgggtcgcatgctgctgactagcattgttcgcggtatcccgttctggggtggtagcacgattgacaccgaactgaaggttatcgacactaactgcattaacgttattcaaccggatggtagctatcgtagcgaagagctgaatctggtcatcattggcccgagcgcagacattatccaattcgagtgcaagagctttggtcacgaggttctgaatctgacccgcaatggctatggtagcacccagtacattcgtttttcgccggattttaccttcggctttgaagagagcctggaggttgataccaatccgttgctgggtgcgggcaaattcgctaccgatccggctgtcacgctggcccatgaactgatccacgcaggccaccgcctgtacggcattgccatcaacccaaaccgtgtgttcaaggttaatacgaatgcatactacgagatgagcggcctggaagtcagcttcgaagaactgcgcaccttcggtggccatgacgctaaattcattgacagcttgcaagagaatgagttccgtctgtactactataacaaattcaaagacattgcaagcacgttgaacaaggccaaaagcatcgttggtactaccgcgtcgttgcagtatatgaagaatgtgtttaaagagaagtacctgctgtccgaggatacctccggcaagtttagcgttgataagctgaagtttgacaaactgtacaagatgctgaccgagatttacaccgaggacaactttgtgaaattcttcaaagtgttgaatcgtaaaacctatctgaattttgacaaagcggttttcaagattaacatcgtgccgaaggtgaactacaccatctatgacggttttaacctgcgtaacaccaacctggcggcgaactttaacggtcagaatacggaaatcaacaacatgaatttcacgaagttgaagaacttcacgggtctgttcgagttctataagctgctgtgcgtgcgcggtatcatcaccagcaaaaccaaaagcctggacaaaggctacaacaaggcgctgaatgacctgtgcattaaggtaaacaattgggatctgttcttttcgccatccgaagataattttaccaacgacctgaacaagggtgaagaaatcaccagcgatacgaatattgaagcagcggaagagaatatcagcctggatctgatccagcagtactatctgacctttaacttcgacaatgaaccggagaacattagcattgagaatctgagcagcgacattatcggtcagctggaactgatgccgaatatcgaacgtttcccgaacggcaaaaagtacgagctggacaagtacactatgttccattacctgcgtgcacaggagtttgaacacggtaaaagccgtatcgcgctgaccaacagcgttaacgaggccctgctgaacccgagccgtgtctataccttcttcagcagcgactatgttaagaaagtgaacaaagccactgaggccgcgatgttcctgggctgggtggaacagctggtatatgacttcacggacgagacgagcgaagtgagcactaccgacaaaattgctgatattaccatcattatcccgtatattggtccggcactgaacattggcaacatgctgtacaaagacgattttgtgggtgccctgatcttctccggtgccgtgattctgctggagttcattccggagattgcgatcccggtgttgggtaccttcgcgctggtgtcctacatcgcgaataaggttctgacggttcagaccatcgataacgcgctgtcgaaacgtaatgaaaaatgggacgaggtttacaaatacattgttacgaattggctggcgaaagtcaatacccagatcgacctgatccgtaagaaaatgaaagaggcgctggagaatcaggcggaggccaccaaagcaattatcaactaccaatacaaccagtacacggaagaagagaagaataacattaacttcaatatcgatgatttgagcagcaagctgaatgaatctatcaacaaagcgatgatcaatatcaacaagtttttgaatcagtgtagcgtttcgtacctgatgaatagcatgattccgtatggcgtcaaacgtctggaggacttcgacgccagcctgaaagatgcgttgctgaaatacatttacgacaatcgtggtacgctgattggccaagttgaccgcttgaaagacaaagttaacaataccctgagcaccgacatcccatttcaactgagcaagtatgttgataatcaacgtctgttgagcactttcaccgagtatatcaaaaacatcatcaatactagcattctgaacctgcgttacgagagcaatcatctgattgatctgagccgttatgcaagcaagatcaacatcggtagcaaggtcaattttgacccgatcgataagaaccagatccagctgtttaatctggaatcgagcaaaattgaggttatcctgaaaaacgccattgtctacaactccatgtacgagaatttctccaccagcttctggattcgcatcccgaaatacttcaacagcattagcctgaacaacgagtatactatcatcaactgtatggagaacaacagcggttggaaggtgtctctgaactatggtgagatcatttggaccttgcaggacacccaagagatcaagcagcgcgtcgtgttcaagtactctcaaatgatcaacatttccgattacattaatcgttggatcttcgtgaccattacgaataaccgtctgaataacagcaagatttacatcaatggtcgcttgatcgatcagaaaccgattagcaacctgggtaatatccacgcaagcaacaacattatgttcaaattggacggttgccgcgatacccatcgttatatctggatcaagtatttcaacctgtttgataaagaactgaatgagaaggagatcaaagatttgtatgacaaccaatctaacagcggcattttgaaggacttctggggcgattatctgcaatacgataagccgtactatatgctgaacctgtatgatccgaacaaatatgtggatgtcaataatgtgggtattcgtggttacatgtatttgaagggtccgcgtggcagcgttatgacgaccaacatttacctgaactctagcctgtaccgtggtacgaaattcatcattaagaaatatgccagcggcaacaaagataacattgtgcgtaataacgatcgtgtctacatcaacgtggtcgtgaagcgtaaagagtaccgtctggcgaccaacgcttcgcaggcgggtgttgagaaaattctgagcgcgttggagatccctcgtgtccgtcgtctgagccaagtcgtggttatgaagagcaagaacgaccagggtatcactaacaagtgcaagatgaacctgcaagaccgtcgtggtaacgacatcggctttattggtttccaccagttcaacaatattgctaaactggtagcgagcaattggtacaatcgtcagattgagcgccgtagccgtcgtttgggctgtagctgggagtttatcccggtcgatgatggttggggcgaacgtccgctg

SEQ ID NO: 38 - protein, 1296 aa, Artificial Sequence
  BoNT/A1 (N1188R, D1213R, G1215R, N1216R, N1242R, N1243R, S1274R, T1277R) Polypeptide Sequence
MPFVNKQFNYKDPVNGVDIAYIKIPNAGQMQPVKAFKIHNKIWVIPERDTFTNPEEGDLNPPPEAKQVPVSYYDSTYLSTDNEKDNYLKGVTKLFERIYSTDLGRMLLTSIVRGIPFWGGSTIDTELKVIDTNCINVIQPDGSYRSEELNLVIIGPSADIIQFECKSFGHEVLNLTRNGYGSTQYIRFSPDFTFGFEESLEVDTNPLLGAGKFATDPAVTLAHELIHAGHRLYGIAINPNRVFKVNTNAYYEMSGLEVSFEELRTFGGHDAKFIDSLQENEFRLYYYNKFKDIASTLNKAKSIVGTTASLQYMKNVFKEKYLLSEDTSGKFSVDKLKFDKLYKMLTEIYTEDNFVKFFKVLNRKTYLNFDKAVFKINIVPKVNYTIYDGFNLRNTNLAANFNGQNTEINNMNFTKLKNFTGLFEFYKLLCVRGIITSKTKSLDKGYNKALNDLCIKVNNWDLFFSPSEDNFTNDLNKGEEITSDTNIEAAEENISLDLIQQYYLTFNFDNEPENISIENLSSDIIGQLELMPNIERFPNGKKYELDKYTMFHYLRAQEFEHGKSRIALTNSVNEALLNPSRVYTFFSSDYVKKVNKATEAAMFLGWVEQLVYDFTDETSEVSTTDKIADITIIIPYIGPALNIGNMLYKDDFVGALIFSGAVILLEFIPEIAIPVLGTFALVSYIANKVLTVQTIDNALSKRNEKWDEVYKYIVTNWLAKVNTQIDLIRKKMKEALENQAEATKAIINYQYNQYTEEEKNNINFNIDDLSSKLNESINKAMININKFLNQCSVSYLMNSMIPYGVKRLEDFDASLKDALLKYIYDNRGTLIGQVDRLKDKVNNTLSTDIPFQLSKYVDNQRLLSTFTEYIKNIINTSILNLRYESNHLIDLSRYASKINIGSKVNFDPIDKNQIQLFNLESSKIEVILKNAIVYNSMYENFSTSFWIRIPKYFNSISLNNEYTIINCMENNSGWKVSLNYGEIIWTLQDTQEIKQRVVFKYSQMINISDYINRWIFVTITNNRLNNSKIYINGRLIDQKPISNLGNIHASNNIMFKLDGCRDTHRYIWIKYFNLFDKELNEKEIKDLYDNQSNSGILKDFWGDYLQYDKPYYMLNLYDPNKYVDVNNVGIRGYMYLKGPRGSVMTTNIYLNSSLYRGTKFIIKKYASGNKDNIVRNNDRVYINVVVKRKEYRLATNASQAGVEKILSALEIPRVRRLSQVVVMKSKNDQGITNKCKMNLQDRRGNDIGFIGFHQFNNIAKLVASNWYNRQIERRSRRLGCSWEFIPVDDGWGERPL

SEQ ID NO: 39 - protein, 1296 aa, Artificial Sequence
  Modified BoNT/A1 (N1188R, D1213R, G1215R, N1216R, N1242R, N1243R, S1274R, T1277R, M1144V) Polypeptide Sequence
MPFVNKQFNYKDPVNGVDIAYIKIPNAGQMQPVKAFKIHNKIWVIPERDTFTNPEEGDLNPPPEAKQVPVSYYDSTYLSTDNEKDNYLKGVTKLFERIYSTDLGRMLLTSIVRGIPFWGGSTIDTELKVIDTNCINVIQPDGSYRSEELNLVIIGPSADIIQFECKSFGHEVLNLTRNGYGSTQYIRFSPDFTFGFEESLEVDTNPLLGAGKFATDPAVTLAHELIHAGHRLYGIAINPNRVFKVNTNAYYEMSGLEVSFEELRTFGGHDAKFIDSLQENEFRLYYYNKFKDIASTLNKAKSIVGTTASLQYMKNVFKEKYLLSEDTSGKFSVDKLKFDKLYKMLTEIYTEDNFVKFFKVLNRKTYLNFDKAVFKINIVPKVNYTIYDGFNLRNTNLAANFNGQNTEINNMNFTKLKNFTGLFEFYKLLCVRGIITSKTKSLDKGYNKALNDLCIKVNNWDLFFSPSEDNFTNDLNKGEEITSDTNIEAAEENISLDLIQQYYLTFNFDNEPENISIENLSSDIIGQLELMPNIERFPNGKKYELDKYTMFHYLRAQEFEHGKSRIALTNSVNEALLNPSRVYTFFSSDYVKKVNKATEAAMFLGWVEQLVYDFTDETSEVSTTDKIADITIIIPYIGPALNIGNMLYKDDFVGALIFSGAVILLEFIPEIAIPVLGTFALVSYIANKVLTVQTIDNALSKRNEKWDEVYKYIVTNWLAKVNTQIDLIRKKMKEALENQAEATKAIINYQYNQYTEEEKNNINFNIDDLSSKLNESINKAMININKFLNQCSVSYLMNSMIPYGVKRLEDFDASLKDALLKYIYDNRGTLIGQVDRLKDKVNNTLSTDIPFQLSKYVDNQRLLSTFTEYIKNIINTSILNLRYESNHLIDLSRYASKINIGSKVNFDPIDKNQIQLFNLESSKIEVILKNAIVYNSMYENFSTSFWIRIPKYFNSISLNNEYTIINCMENNSGWKVSLNYGEIIWTLQDTQEIKQRVVFKYSQMINISDYINRWIFVTITNNRLNNSKIYINGRLIDQKPISNLGNIHASNNIMFKLDGCRDTHRYIWIKYFNLFDKELNEKEIKDLYDNQSNSGILKDFWGDYLQYDKPYYMLNLYDPNKYVDVNNVGIRGYMYLKGPRGSVVTTNIYLNSSLYRGTKFIIKKYASGNKDNIVRNNDRVYINVVVKRKEYRLATNASQAGVEKILSALEIPRVRRLSQVVVMKSKNDQGITNKCKMNLQDRRGNDIGFIGFHQFNNIAKLVASNWYNRQIERRSRRLGCSWEFIPVDDGWGERPL

SEQ ID NO: 40 - protein, 1296 aa, Artificial Sequence
  Modified BoNT/A1 (N1188R, D1213R, G1215R, N1216R, N1242R, N1243R, S1274R, T1277R, M1144G) Polypeptide Sequence
MPFVNKQFNYKDPVNGVDIAYIKIPNAGQMQPVKAFKIHNKIWVIPERDTFTNPEEGDLNPPPEAKQVPVSYYDSTYLSTDNEKDNYLKGVTKLFERIYSTDLGRMLLTSIVRGIPFWGGSTIDTELKVIDTNCINVIQPDGSYRSEELNLVIIGPSADIIQFECKSFGHEVLNLTRNGYGSTQYIRFSPDFTFGFEESLEVDTNPLLGAGKFATDPAVTLAHELIHAGHRLYGIAINPNRVFKVNTNAYYEMSGLEVSFEELRTFGGHDAKFIDSLQENEFRLYYYNKFKDIASTLNKAKSIVGTTASLQYMKNVFKEKYLLSEDTSGKFSVDKLKFDKLYKMLTEIYTEDNFVKFFKVLNRKTYLNFDKAVFKINIVPKVNYTIYDGFNLRNTNLAANFNGQNTEINNMNFTKLKNFTGLFEFYKLLCVRGIITSKTKSLDKGYNKALNDLCIKVNNWDLFFSPSEDNFTNDLNKGEEITSDTNIEAAEENISLDLIQQYYLTFNFDNEPENISIENLSSDIIGQLELMPNIERFPNGKKYELDKYTMFHYLRAQEFEHGKSRIALTNSVNEALLNPSRVYTFFSSDYVKKVNKATEAAMFLGWVEQLVYDFTDETSEVSTTDKIADITIIIPYIGPALNIGNMLYKDDFVGALIFSGAVILLEFIPEIAIPVLGTFALVSYIANKVLTVQTIDNALSKRNEKWDEVYKYIVTNWLAKVNTQIDLIRKKMKEALENQAEATKAIINYQYNQYTEEEKNNINFNIDDLSSKLNESINKAMININKFLNQCSVSYLMNSMIPYGVKRLEDFDASLKDALLKYIYDNRGTLIGQVDRLKDKVNNTLSTDIPFQLSKYVDNQRLLSTFTEYIKNIINTSILNLRYESNHLIDLSRYASKINIGSKVNFDPIDKNQIQLFNLESSKIEVILKNAIVYNSMYENFSTSFWIRIPKYFNSISLNNEYTIINCMENNSGWKVSLNYGEIIWTLQDTQEIKQRVVFKYSQMINISDYINRWIFVTITNNRLNNSKIYINGRLIDQKPISNLGNIHASNNIMFKLDGCRDTHRYIWIKYFNLFDKELNEKEIKDLYDNQSNSGILKDFWGDYLQYDKPYYMLNLYDPNKYVDVNNVGIRGYMYLKGPRGSVGTTNIYLNSSLYRGTKFIIKKYASGNKDNIVRNNDRVYINVVVKRKEYRLATNASQAGVEKILSALEIPRVRRLSQVVVMKSKNDQGITNKCKMNLQDRRGNDIGFIGFHQFNNIAKLVASNWYNRQIERRSRRLGCSWEFIPVDDGWGERPL

SEQ ID NO: 41 - protein, 1296 aa, Artificial Sequence
  Modified BoNT/A1 (N1188R, D1213R, G1215R, N1216R, N1242R, N1243R, S1274R, T1277R, M1144L) Polypeptide Sequence
MPFVNKQFNYKDPVNGVDIAYIKIPNAGQMQPVKAFKIHNKIWVIPERDTFTNPEEGDLNPPPEAKQVPVSYYDSTYLSTDNEKDNYLKGVTKLFERIYSTDLGRMLLTSIVRGIPFWGGSTIDTELKVIDTNCINVIQPDGSYRSEELNLVIIGPSADIIQFECKSFGHEVLNLTRNGYGSTQYIRFSPDFTFGFEESLEVDTNPLLGAGKFATDPAVTLAHELIHAGHRLYGIAINPNRVFKVNTNAYYEMSGLEVSFEELRTFGGHDAKFIDSLQENEFRLYYYNKFKDIASTLNKAKSIVGTTASLQYMKNVFKEKYLLSEDTSGKFSVDKLKFDKLYKMLTEIYTEDNFVKFFKVLNRKTYLNFDKAVFKINIVPKVNYTIYDGFNLRNTNLAANFNGQNTEINNMNFTKLKNFTGLFEFYKLLCVRGIITSKTKSLDKGYNKALNDLCIKVNNWDLFFSPSEDNFTNDLNKGEEITSDTNIEAAEENISLDLIQQYYLTFNFDNEPENISIENLSSDIIGQLELMPNIERFPNGKKYELDKYTMFHYLRAQEFEHGKSRIALTNSVNEALLNPSRVYTFFSSDYVKKVNKATEAAMFLGWVEQLVYDFTDETSEVSTTDKIADITIIIPYIGPALNIGNMLYKDDFVGALIFSGAVILLEFIPEIAIPVLGTFALVSYIANKVLTVQTIDNALSKRNEKWDEVYKYIVTNWLAKVNTQIDLIRKKMKEALENQAEATKAIINYQYNQYTEEEKNNINFNIDDLSSKLNESINKAMININKFLNQCSVSYLMNSMIPYGVKRLEDFDASLKDALLKYIYDNRGTLIGQVDRLKDKVNNTLSTDIPFQLSKYVDNQRLLSTFTEYIKNIINTSILNLRYESNHLIDLSRYASKINIGSKVNFDPIDKNQIQLFNLESSKIEVILKNAIVYNSMYENFSTSFWIRIPKYFNSISLNNEYTIINCMENNSGWKVSLNYGEIIWTLQDTQEIKQRVVFKYSQMINISDYINRWIFVTITNNRLNNSKIYINGRLIDQKPISNLGNIHASNNIMFKLDGCRDTHRYIWIKYFNLFDKELNEKEIKDLYDNQSNSGILKDFWGDYLQYDKPYYMLNLYDPNKYVDVNNVGIRGYMYLKGPRGSVLTTNIYLNSSLYRGTKFIIKKYASGNKDNIVRNNDRVYINVVVKRKEYRLATNASQAGVEKILSALEIPRVRRLSQVVVMKSKNDQGITNKCKMNLQDRRGNDIGFIGFHQFNNIAKLVASNWYNRQIERRSRRLGCSWEFIPVDDGWGERPL

SEQ ID NO: 42 - protein, 1296 aa, Artificial Sequence
  Modified BoNT/A1 (N1188R, D1213R, G1215R, N1216R, N1242R, N1243R, S1274R, T1277R, M1144T) Polypeptide Sequence
MPFVNKQFNYKDPVNGVDIAYIKIPNAGQMQPVKAFKIHNKIWVIPERDTFTNPEEGDLNPPPEAKQVPVSYYDSTYLSTDNEKDNYLKGVTKLFERIYSTDLGRMLLTSIVRGIPFWGGSTIDTELKVIDTNCINVIQPDGSYRSEELNLVIIGPSADIIQFECKSFGHEVLNLTRNGYGSTQYIRFSPDFTFGFEESLEVDTNPLLGAGKFATDPAVTLAHELIHAGHRLYGIAINPNRVFKVNTNAYYEMSGLEVSFEELRTFGGHDAKFIDSLQENEFRLYYYNKFKDIASTLNKAKSIVGTTASLQYMKNVFKEKYLLSEDTSGKFSVDKLKFDKLYKMLTEIYTEDNFVKFFKVLNRKTYLNFDKAVFKINIVPKVNYTIYDGFNLRNTNLAANFNGQNTEINNMNFTKLKNFTGLFEFYKLLCVRGIITSKTKSLDKGYNKALNDLCIKVNNWDLFFSPSEDNFTNDLNKGEEITSDTNIEAAEENISLDLIQQYYLTFNFDNEPENISIENLSSDIIGQLELMPNIERFPNGKKYELDKYTMFHYLRAQEFEHGKSRIALTNSVNEALLNPSRVYTFFSSDYVKKVNKATEAAMFLGWVEQLVYDFTDETSEVSTTDKIADITIIIPYIGPALNIGNMLYKDDFVGALIFSGAVILLEFIPEIAIPVLGTFALVSYIANKVLTVQTIDNALSKRNEKWDEVYKYIVTNWLAKVNTQIDLIRKKMKEALENQAEATKAIINYQYNQYTEEEKNNINFNIDDLSSKLNESINKAMININKFLNQCSVSYLMNSMIPYGVKRLEDFDASLKDALLKYIYDNRGTLIGQVDRLKDKVNNTLSTDIPFQLSKYVDNQRLLSTFTEYIKNIINTSILNLRYESNHLIDLSRYASKINIGSKVNFDPIDKNQIQLFNLESSKIEVILKNAIVYNSMYENFSTSFWIRIPKYFNSISLNNEYTIINCMENNSGWKVSLNYGEIIWTLQDTQEIKQRVVFKYSQMINISDYINRWIFVTITNNRLNNSKIYINGRLIDQKPISNLGNIHASNNIMFKLDGCRDTHRYIWIKYFNLFDKELNEKEIKDLYDNQSNSGILKDFWGDYLQYDKPYYMLNLYDPNKYVDVNNVGIRGYMYLKGPRGSVTTTNIYLNSSLYRGTKFIIKKYASGNKDNIVRNNDRVYINVVVKRKEYRLATNASQAGVEKILSALEIPRVRRLSQVVVMKSKNDQGITNKCKMNLQDRRGNDIGFIGFHQFNNIAKLVASNWYNRQIERRSRRLGCSWEFIPVDDGWGERPL

SEQ ID NO: 43 - protein, 1296 aa, Artificial Sequence
  Modified BoNT/A1 (N1188R, D1213R, G1215R, N1216R, N1242R, N1243R, S1274R, T1277R, M1144A) Polypeptide Sequence
MPFVNKQFNYKDPVNGVDIAYIKIPNAGQMQPVKAFKIHNKIWVIPERDTFTNPEEGDLNPPPEAKQVPVSYYDSTYLSTDNEKDNYLKGVTKLFERIYSTDLGRMLLTSIVRGIPFWGGSTIDTELKVIDTNCINVIQPDGSYRSEELNLVIIGPSADIIQFECKSFGHEVLNLTRNGYGSTQYIRFSPDFTFGFEESLEVDTNPLLGAGKFATDPAVTLAHELIHAGHRLYGIAINPNRVFKVNTNAYYEMSGLEVSFEELRTFGGHDAKFIDSLQENEFRLYYYNKFKDIASTLNKAKSIVGTTASLQYMKNVFKEKYLLSEDTSGKFSVDKLKFDKLYKMLTEIYTEDNFVKFFKVLNRKTYLNFDKAVFKINIVPKVNYTIYDGFNLRNTNLAANFNGQNTEINNMNFTKLKNFTGLFEFYKLLCVRGIITSKTKSLDKGYNKALNDLCIKVNNWDLFFSPSEDNFTNDLNKGEEITSDTNIEAAEENISLDLIQQYYLTFNFDNEPENISIENLSSDIIGQLELMPNIERFPNGKKYELDKYTMFHYLRAQEFEHGKSRIALTNSVNEALLNPSRVYTFFSSDYVKKVNKATEAAMFLGWVEQLVYDFTDETSEVSTTDKIADITIIIPYIGPALNIGNMLYKDDFVGALIFSGAVILLEFIPEIAIPVLGTFALVSYIANKVLTVQTIDNALSKRNEKWDEVYKYIVTNWLAKVNTQIDLIRKKMKEALENQAEATKAIINYQYNQYTEEEKNNINFNIDDLSSKLNESINKAMININKFLNQCSVSYLMNSMIPYGVKRLEDFDASLKDALLKYIYDNRGTLIGQVDRLKDKVNNTLSTDIPFQLSKYVDNQRLLSTFTEYIKNIINTSILNLRYESNHLIDLSRYASKINIGSKVNFDPIDKNQIQLFNLESSKIEVILKNAIVYNSMYENFSTSFWIRIPKYFNSISLNNEYTIINCMENNSGWKVSLNYGEIIWTLQDTQEIKQRVVFKYSQMINISDYINRWIFVTITNNRLNNSKIYINGRLIDQKPISNLGNIHASNNIMFKLDGCRDTHRYIWIKYFNLFDKELNEKEIKDLYDNQSNSGILKDFWGDYLQYDKPYYMLNLYDPNKYVDVNNVGIRGYMYLKGPRGSVATTNIYLNSSLYRGTKFIIKKYASGNKDNIVRNNDRVYINVVVKRKEYRLATNASQAGVEKILSALEIPRVRRLSQVVVMKSKNDQGITNKCKMNLQDRRGNDIGFIGFHQFNNIAKLVASNWYNRQIERRSRRLGCSWEFIPVDDGWGERPL

SEQ ID NO: 44 - protein, 1296 aa, Artificial Sequence
  Modified BoNT/A1 (N1188R, D1213R, G1215R, N1216R, N1242R, N1243R, S1274R, T1277R, M1144I) Polypeptide Sequence
MPFVNKQFNYKDPVNGVDIAYIKIPNAGQMQPVKAFKIHNKIWVIPERDTFTNPEEGDLNPPPEAKQVPVSYYDSTYLSTDNEKDNYLKGVTKLFERIYSTDLGRMLLTSIVRGIPFWGGSTIDTELKVIDTNCINVIQPDGSYRSEELNLVIIGPSADIIQFECKSFGHEVLNLTRNGYGSTQYIRFSPDFTFGFEESLEVDTNPLLGAGKFATDPAVTLAHELIHAGHRLYGIAINPNRVFKVNTNAYYEMSGLEVSFEELRTFGGHDAKFIDSLQENEFRLYYYNKFKDIASTLNKAKSIVGTTASLQYMKNVFKEKYLLSEDTSGKFSVDKLKFDKLYKMLTEIYTEDNFVKFFKVLNRKTYLNFDKAVFKINIVPKVNYTIYDGFNLRNTNLAANFNGQNTEINNMNFTKLKNFTGLFEFYKLLCVRGIITSKTKSLDKGYNKALNDLCIKVNNWDLFFSPSEDNFTNDLNKGEEITSDTNIEAAEENISLDLIQQYYLTFNFDNEPENISIENLSSDIIGQLELMPNIERFPNGKKYELDKYTMFHYLRAQEFEHGKSRIALTNSVNEALLNPSRVYTFFSSDYVKKVNKATEAAMFLGWVEQLVYDFTDETSEVSTTDKIADITIIIPYIGPALNIGNMLYKDDFVGALIFSGAVILLEFIPEIAIPVLGTFALVSYIANKVLTVQTIDNALSKRNEKWDEVYKYIVTNWLAKVNTQIDLIRKKMKEALENQAEATKAIINYQYNQYTEEEKNNINFNIDDLSSKLNESINKAMININKFLNQCSVSYLMNSMIPYGVKRLEDFDASLKDALLKYIYDNRGTLIGQVDRLKDKVNNTLSTDIPFQLSKYVDNQRLLSTFTEYIKNIINTSILNLRYESNHLIDLSRYASKINIGSKVNFDPIDKNQIQLFNLESSKIEVILKNAIVYNSMYENFSTSFWIRIPKYFNSISLNNEYTIINCMENNSGWKVSLNYGEIIWTLQDTQEIKQRVVFKYSQMINISDYINRWIFVTITNNRLNNSKIYINGRLIDQKPISNLGNIHASNNIMFKLDGCRDTHRYIWIKYFNLFDKELNEKEIKDLYDNQSNSGILKDFWGDYLQYDKPYYMLNLYDPNKYVDVNNVGIRGYMYLKGPRGSVITTNIYLNSSLYRGTKFIIKKYASGNKDNIVRNNDRVYINVVVKRKEYRLATNASQAGVEKILSALEIPRVRRLSQVVVMKSKNDQGITNKCKMNLQDRRGNDIGFIGFHQFNNIAKLVASNWYNRQIERRSRRLGCSWEFIPVDDGWGERPL

SEQ ID NO: 45 - protein, 1295 aa, Artificial Sequence
  Modified BoNT/A1 (N1188R, D1213R, G1215R, N1216R, N1242R, N1243R, S1274R, T1277R, M1144 Deletion) Polypeptide Sequence
MPFVNKQFNYKDPVNGVDIAYIKIPNAGQMQPVKAFKIHNKIWVIPERDTFTNPEEGDLNPPPEAKQVPVSYYDSTYLSTDNEKDNYLKGVTKLFERIYSTDLGRMLLTSIVRGIPFWGGSTIDTELKVIDTNCINVIQPDGSYRSEELNLVIIGPSADIIQFECKSFGHEVLNLTRNGYGSTQYIRFSPDFTFGFEESLEVDTNPLLGAGKFATDPAVTLAHELIHAGHRLYGIAINPNRVFKVNTNAYYEMSGLEVSFEELRTFGGHDAKFIDSLQENEFRLYYYNKFKDIASTLNKAKSIVGTTASLQYMKNVFKEKYLLSEDTSGKFSVDKLKFDKLYKMLTEIYTEDNFVKFFKVLNRKTYLNFDKAVFKINIVPKVNYTIYDGFNLRNTNLAANFNGQNTEINNMNFTKLKNFTGLFEFYKLLCVRGIITSKTKSLDKGYNKALNDLCIKVNNWDLFFSPSEDNFTNDLNKGEEITSDTNIEAAEENISLDLIQQYYLTFNFDNEPENISIENLSSDIIGQLELMPNIERFPNGKKYELDKYTMFHYLRAQEFEHGKSRIALTNSVNEALLNPSRVYTFFSSDYVKKVNKATEAAMFLGWVEQLVYDFTDETSEVSTTDKIADITIIIPYIGPALNIGNMLYKDDFVGALIFSGAVILLEFIPEIAIPVLGTFALVSYIANKVLTVQTIDNALSKRNEKWDEVYKYIVTNWLAKVNTQIDLIRKKMKEALENQAEATKAIINYQYNQYTEEEKNNINFNIDDLSSKLNESINKAMININKFLNQCSVSYLMNSMIPYGVKRLEDFDASLKDALLKYIYDNRGTLIGQVDRLKDKVNNTLSTDIPFQLSKYVDNQRLLSTFTEYIKNIINTSILNLRYESNHLIDLSRYASKINIGSKVNFDPIDKNQIQLFNLESSKIEVILKNAIVYNSMYENFSTSFWIRIPKYFNSISLNNEYTIINCMENNSGWKVSLNYGEIIWTLQDTQEIKQRVVFKYSQMINISDYINRWIFVTITNNRLNNSKIYINGRLIDQKPISNLGNIHASNNIMFKLDGCRDTHRYIWIKYFNLFDKELNEKEIKDLYDNQSNSGILKDFWGDYLQYDKPYYMLNLYDPNKYVDVNNVGIRGYMYLKGPRGSVTTNIYLNSSLYRGTKFIIKKYASGNKDNIVRNNDRVYINVVVKRKEYRLATNASQAGVEKILSALEIPRVRRLSQVVVMKSKNDQGITNKCKMNLQDRRGNDIGFIGFHQFNNIAKLVASNWYNRQIERRSRRLGCSWEFIPVDDGWGERPL

SEQ ID NO: 46 - protein, 1292 aa, Clostridium botulinum
MPFVNKPFNYRDPGNGVDIAYIKIPNAGQMQPVKAFKIHEGVWVIPERDTFTNPEEGDLNPPPEAKQVPVSYYDSTYLSTDNEKDNYLKGVIKLFDRIYSTGLGRMLLSFIVKGIPFWGGSTIDTELKVIDTNCINVIEPGGSYRSEELNLVITGPSADIIQFECKSFGHDVFNLTRNGYGSTQYIRFSPDFTFGFEESLEVDTNPLLGAGTFATDPAVTLAHELIHAAHRLYGIAINPNRVLKVKTNAYYEMSGLEVSFEELRTFGGNDTNFIDSLWQKKFSRDAYDNLQNIARILNEAKTIVGTTTPLQYMKNIFIRKYFLSEDASGKISVNKAAFKEFYRVLTRGFTELEFVNPFKVINRKTYLNFDKAVFRINIVPDENYTINEGFNLEGANSNGQNTEINSRNFTRLKNFTGLFEFYKLLCVRGIIPFKTKSLDEGYNKALNYLCIKVNNWDLFFSPSEDNFTNDLDKVEEITADTNIEAAEENISSDLIQQYYLTFDFDNEPENISIENLSSDIIGQLEPMPNIERFPNGKKYELDKYTMFHYLRAQEFEHGDSRIILTNSAEEALLKPNVAYTFFSSKYVKKINKAVEAVIFLSWAEELVYDFTDETNEVTTMDKIADITIIVPYIGPALNIGNMVSKGEFVEAILFTGVVALLEFIPEYSLPVFGTFAIVSYIANKVLTVQTINNALSKRNEKWDEVYKYTVTNWLAKVNTQIDLIREKMKKALENQAEATRAIINYQYNQYTEEEKNNINFNIDDLSSKLNRSINRAMININKFLDQCSVSYLMNSMIPYAVKRLKDFDASVRDVLLKYIYDNRGTLILQVDRLKDEVNNTLSADIPFQLSKYVNDKKLLSTFTEYIKNIVNTSILSIVYKKDDLIDLSRYGAKINIGDRVYYDSIDKNQIKLINLESSTIEVILKNAIVYNSMYENFSTSFWIKIPKYFSKINLNNEYTIINCIENNSGWKVSLNYGEIIWTLQDNKQNIQRVVFKYSQMVNISDYINRWMFVTITNNRLTKSKIYINGRLIDQKPISNLGNIHASNKIMFKLDGCRDPRRYIMIKYFNLFDKELNEKEIKDLYDSQSNPGILKDFWGNYLQYDKPYYMLNLFDPNKYVDVNNIGIRGYMYLKGPRGSVMTTNIYLNSTLYMGTKFIIKKYASGNEDNIVRNNDRVYINVVVKNKEYRLATNASQAGVEKILSALEIPDVGNLSQVVVMKSKDDQGIRNKCKMNLQDNNGNDIGFVGFHLYDNIAKLVASNWYNRQVGKASRTFGCSWEFIPVDDGWGESSL

SEQ ID NO: 47 - protein, 1292 aa, Artificial Sequence
  Modified BoNT/A3 (M1140V) Polypeptide Sequence
MPFVNKPFNYRDPGNGVDIAYIKIPNAGQMQPVKAFKIHEGVWVIPERDTFTNPEEGDLNPPPEAKQVPVSYYDSTYLSTDNEKDNYLKGVIKLFDRIYSTGLGRMLLSFIVKGIPFWGGSTIDTELKVIDTNCINVIEPGGSYRSEELNLVITGPSADIIQFECKSFGHDVFNLTRNGYGSTQYIRFSPDFTFGFEESLEVDTNPLLGAGTFATDPAVTLAHELIHAAHRLYGIAINPNRVLKVKTNAYYEMSGLEVSFEELRTFGGNDTNFIDSLWQKKFSRDAYDNLQNIARILNEAKTIVGTTTPLQYMKNIFIRKYFLSEDASGKISVNKAAFKEFYRVLTRGFTELEFVNPFKVINRKTYLNFDKAVFRINIVPDENYTINEGFNLEGANSNGQNTEINSRNFTRLKNFTGLFEFYKLLCVRGIIPFKTKSLDEGYNKALNYLCIKVNNWDLFFSPSEDNFTNDLDKVEEITADTNIEAAEENISSDLIQQYYLTFDFDNEPENISIENLSSDIIGQLEPMPNIERFPNGKKYELDKYTMFHYLRAQEFEHGDSRIILTNSAEEALLKPNVAYTFFSSKYVKKINKAVEAVIFLSWAEELVYDFTDETNEVTTMDKIADITIIVPYIGPALNIGNMVSKGEFVEAILFTGVVALLEFIPEYSLPVFGTFAIVSYIANKVLTVQTINNALSKRNEKWDEVYKYTVTNWLAKVNTQIDLIREKMKKALENQAEATRAIINYQYNQYTEEEKNNINFNIDDLSSKLNRSINRAMININKFLDQCSVSYLMNSMIPYAVKRLKDFDASVRDVLLKYIYDNRGTLILQVDRLKDEVNNTLSADIPFQLSKYVNDKKLLSTFTEYIKNIVNTSILSIVYKKDDLIDLSRYGAKINIGDRVYYDSIDKNQIKLINLESSTIEVILKNAIVYNSMYENFSTSFWIKIPKYFSKINLNNEYTIINCIENNSGWKVSLNYGEIIWTLQDNKQNIQRVVFKYSQMVNISDYINRWMFVTITNNRLTKSKIYINGRLIDQKPISNLGNIHASNKIMFKLDGCRDPRRYIMIKYFNLFDKELNEKEIKDLYDSQSNPGILKDFWGNYLQYDKPYYMLNLFDPNKYVDVNNIGIRGYMYLKGPRGSVVTTNIYLNSTLYMGTKFIIKKYASGNEDNIVRNNDRVYINVVVKNKEYRLATNASQAGVEKILSALEIPDVGNLSQVVVMKSKDDQGIRNKCKMNLQDNNGNDIGFVGFHLYDNIAKLVASNWYNRQVGKASRTFGCSWEFIPVDDGWGESSL

SEQ ID NO: 48 - protein, 1292 aa, Artificial Sequence
  Modified BoNT/A3 (M1140G) Polypeptide Sequence
MPFVNKPFNYRDPGNGVDIAYIKIPNAGQMQPVKAFKIHEGVWVIPERDTFTNPEEGDLNPPPEAKQVPVSYYDSTYLSTDNEKDNYLKGVIKLFDRIYSTGLGRMLLSFIVKGIPFWGGSTIDTELKVIDTNCINVIEPGGSYRSEELNLVITGPSADIIQFECKSFGHDVFNLTRNGYGSTQYIRFSPDFTFGFEESLEVDTNPLLGAGTFATDPAVTLAHELIHAAHRLYGIAINPNRVLKVKTNAYYEMSGLEVSFEELRTFGGNDTNFIDSLWQKKFSRDAYDNLQNIARILNEAKTIVGTTTPLQYMKNIFIRKYFLSEDASGKISVNKAAFKEFYRVLTRGFTELEFVNPFKVINRKTYLNFDKAVFRINIVPDENYTINEGFNLEGANSNGQNTEINSRNFTRLKNFTGLFEFYKLLCVRGIIPFKTKSLDEGYNKALNYLCIKVNNWDLFFSPSEDNFTNDLDKVEEITADTNIEAAEENISSDLIQQYYLTFDFDNEPENISIENLSSDIIGQLEPMPNIERFPNGKKYELDKYTMFHYLRAQEFEHGDSRIILTNSAEEALLKPNVAYTFFSSKYVKKINKAVEAVIFLSWAEELVYDFTDETNEVTTMDKIADITIIVPYIGPALNIGNMVSKGEFVEAILFTGVVALLEFIPEYSLPVFGTFAIVSYIANKVLTVQTINNALSKRNEKWDEVYKYTVTNWLAKVNTQIDLIREKMKKALENQAEATRAIINYQYNQYTEEEKNNINFNIDDLSSKLNRSINRAMININKFLDQCSVSYLMNSMIPYAVKRLKDFDASVRDVLLKYIYDNRGTLILQVDRLKDEVNNTLSADIPFQLSKYVNDKKLLSTFTEYIKNIVNTSILSIVYKKDDLIDLSRYGAKINIGDRVYYDSIDKNQIKLINLESSTIEVILKNAIVYNSMYENFSTSFWIKIPKYFSKINLNNEYTIINCIENNSGWKVSLNYGEIIWTLQDNKQNIQRVVFKYSQMVNISDYINRWMFVTITNNRLTKSKIYINGRLIDQKPISNLGNIHASNKIMFKLDGCRDPRRYIMIKYFNLFDKELNEKEIKDLYDSQSNPGILKDFWGNYLQYDKPYYMLNLFDPNKYVDVNNIGIRGYMYLKGPRGSVGTTNIYLNSTLYMGTKFIIKKYASGNEDNIVRNNDRVYINVVVKNKEYRLATNASQAGVEKILSALEIPDVGNLSQVVVMKSKDDQGIRNKCKMNLQDNNGNDIGFVGFHLYDNIAKLVASNWYNRQVGKASRTFGCSWEFIPVDDGWGESSL

SEQ ID NO: 49 - protein, 1292 aa, Artificial Sequence
  Modified BoNT/A3 (M1140L) Polypeptide Sequence
MPFVNKPFNYRDPGNGVDIAYIKIPNAGQMQPVKAFKIHEGVWVIPERDTFTNPEEGDLNPPPEAKQVPVSYYDSTYLSTDNEKDNYLKGVIKLFDRIYSTGLGRMLLSFIVKGIPFWGGSTIDTELKVIDTNCINVIEPGGSYRSEELNLVITGPSADIIQFECKSFGHDVFNLTRNGYGSTQYIRFSPDFTFGFEESLEVDTNPLLGAGTFATDPAVTLAHELIHAAHRLYGIAINPNRVLKVKTNAYYEMSGLEVSFEELRTFGGNDTNFIDSLWQKKFSRDAYDNLQNIARILNEAKTIVGTTTPLQYMKNIFIRKYFLSEDASGKISVNKAAFKEFYRVLTRGFTELEFVNPFKVINRKTYLNFDKAVFRINIVPDENYTINEGFNLEGANSNGQNTEINSRNFTRLKNFTGLFEFYKLLCVRGIIPFKTKSLDEGYNKALNYLCIKVNNWDLFFSPSEDNFTNDLDKVEEITADTNIEAAEENISSDLIQQYYLTFDFDNEPENISIENLSSDIIGQLEPMPNIERFPNGKKYELDKYTMFHYLRAQEFEHGDSRIILTNSAEEALLKPNVAYTFFSSKYVKKINKAVEAVIFLSWAEELVYDFTDETNEVTTMDKIADITIIVPYIGPALNIGNMVSKGEFVEAILFTGVVALLEFIPEYSLPVFGTFAIVSYIANKVLTVQTINNALSKRNEKWDEVYKYTVTNWLAKVNTQIDLIREKMKKALENQAEATRAIINYQYNQYTEEEKNNINFNIDDLSSKLNRSINRAMININKFLDQCSVSYLMNSMIPYAVKRLKDFDASVRDVLLKYIYDNRGTLILQVDRLKDEVNNTLSADIPFQLSKYVNDKKLLSTFTEYIKNIVNTSILSIVYKKDDLIDLSRYGAKINIGDRVYYDSIDKNQIKLINLESSTIEVILKNAIVYNSMYENFSTSFWIKIPKYFSKINLNNEYTIINCIENNSGWKVSLNYGEIIWTLQDNKQNIQRVVFKYSQMVNISDYINRWMFVTITNNRLTKSKIYINGRLIDQKPISNLGNIHASNKIMFKLDGCRDPRRYIMIKYFNLFDKELNEKEIKDLYDSQSNPGILKDFWGNYLQYDKPYYMLNLFDPNKYVDVNNIGIRGYMYLKGPRGSVLTTNIYLNSTLYMGTKFIIKKYASGNEDNIVRNNDRVYINVVVKNKEYRLATNASQAGVEKILSALEIPDVGNLSQVVVMKSKDDQGIRNKCKMNLQDNNGNDIGFVGFHLYDNIAKLVASNWYNRQVGKASRTFGCSWEFIPVDDGWGESSL

SEQ ID NO: 50 - protein, 1292 aa, Artificial Sequence
  Modified BoNT/A3 (M1140T) Polypeptide Sequence
MPFVNKPFNYRDPGNGVDIAYIKIPNAGQMQPVKAFKIHEGVWVIPERDTFTNPEEGDLNPPPEAKQVPVSYYDSTYLSTDNEKDNYLKGVIKLFDRIYSTGLGRMLLSFIVKGIPFWGGSTIDTELKVIDTNCINVIEPGGSYRSEELNLVITGPSADIIQFECKSFGHDVFNLTRNGYGSTQYIRFSPDFTFGFEESLEVDTNPLLGAGTFATDPAVTLAHELIHAAHRLYGIAINPNRVLKVKTNAYYEMSGLEVSFEELRTFGGNDTNFIDSLWQKKFSRDAYDNLQNIARILNEAKTIVGTTTPLQYMKNIFIRKYFLSEDASGKISVNKAAFKEFYRVLTRGFTELEFVNPFKVINRKTYLNFDKAVFRINIVPDENYTINEGFNLEGANSNGQNTEINSRNFTRLKNFTGLFEFYKLLCVRGIIPFKTKSLDEGYNKALNYLCIKVNNWDLFFSPSEDNFTNDLDKVEEITADTNIEAAEENISSDLIQQYYLTFDFDNEPENISIENLSSDIIGQLEPMPNIERFPNGKKYELDKYTMFHYLRAQEFEHGDSRIILTNSAEEALLKPNVAYTFFSSKYVKKINKAVEAVIFLSWAEELVYDFTDETNEVTTMDKIADITIIVPYIGPALNIGNMVSKGEFVEAILFTGVVALLEFIPEYSLPVFGTFAIVSYIANKVLTVQTINNALSKRNEKWDEVYKYTVTNWLAKVNTQIDLIREKMKKALENQAEATRAIINYQYNQYTEEEKNNINFNIDDLSSKLNRSINRAMININKFLDQCSVSYLMNSMIPYAVKRLKDFDASVRDVLLKYIYDNRGTLILQVDRLKDEVNNTLSADIPFQLSKYVNDKKLLSTFTEYIKNIVNTSILSIVYKKDDLIDLSRYGAKINIGDRVYYDSIDKNQIKLINLESSTIEVILKNAIVYNSMYENFSTSFWIKIPKYFSKINLNNEYTIINCIENNSGWKVSLNYGEIIWTLQDNKQNIQRVVFKYSQMVNISDYINRWMFVTITNNRLTKSKIYINGRLIDQKPISNLGNIHASNKIMFKLDGCRDPRRYIMIKYFNLFDKELNEKEIKDLYDSQSNPGILKDFWGNYLQYDKPYYMLNLFDPNKYVDVNNIGIRGYMYLKGPRGSVTTTNIYLNSTLYMGTKFIIKKYASGNEDNIVRNNDRVYINVVVKNKEYRLATNASQAGVEKILSALEIPDVGNLSQVVVMKSKDDQGIRNKCKMNLQDNNGNDIGFVGFHLYDNIAKLVASNWYNRQVGKASRTFGCSWEFIPVDDGWGESSL

SEQ ID NO: 51 - protein, 1292 aa, Artificial Sequence
  Modified BoNT/A3 (M1140A) Polypeptide Sequence
MPFVNKPFNYRDPGNGVDIAYIKIPNAGQMQPVKAFKIHEGVWVIPERDTFTNPEEGDLNPPPEAKQVPVSYYDSTYLSTDNEKDNYLKGVIKLFDRIYSTGLGRMLLSFIVKGIPFWGGSTIDTELKVIDTNCINVIEPGGSYRSEELNLVITGPSADIIQFECKSFGHDVFNLTRNGYGSTQYIRFSPDFTFGFEESLEVDTNPLLGAGTFATDPAVTLAHELIHAAHRLYGIAINPNRVLKVKTNAYYEMSGLEVSFEELRTFGGNDTNFIDSLWQKKFSRDAYDNLQNIARILNEAKTIVGTTTPLQYMKNIFIRKYFLSEDASGKISVNKAAFKEFYRVLTRGFTELEFVNPFKVINRKTYLNFDKAVFRINIVPDENYTINEGFNLEGANSNGQNTEINSRNFTRLKNFTGLFEFYKLLCVRGIIPFKTKSLDEGYNKALNYLCIKVNNWDLFFSPSEDNFTNDLDKVEEITADTNIEAAEENISSDLIQQYYLTFDFDNEPENISIENLSSDIIGQLEPMPNIERFPNGKKYELDKYTMFHYLRAQEFEHGDSRIILTNSAEEALLKPNVAYTFFSSKYVKKINKAVEAVIFLSWAEELVYDFTDETNEVTTMDKIADITIIVPYIGPALNIGNMVSKGEFVEAILFTGVVALLEFIPEYSLPVFGTFAIVSYIANKVLTVQTINNALSKRNEKWDEVYKYTVTNWLAKVNTQIDLIREKMKKALENQAEATRAIINYQYNQYTEEEKNNINFNIDDLSSKLNRSINRAMININKFLDQCSVSYLMNSMIPYAVKRLKDFDASVRDVLLKYIYDNRGTLILQVDRLKDEVNNTLSADIPFQLSKYVNDKKLLSTFTEYIKNIVNTSILSIVYKKDDLIDLSRYGAKINIGDRVYYDSIDKNQIKLINLESSTIEVILKNAIVYNSMYENFSTSFWIKIPKYFSKINLNNEYTIINCIENNSGWKVSLNYGEIIWTLQDNKQNIQRVVFKYSQMVNISDYINRWMFVTITNNRLTKSKIYINGRLIDQKPISNLGNIHASNKIMFKLDGCRDPRRYIMIKYFNLFDKELNEKEIKDLYDSQSNPGILKDFWGNYLQYDKPYYMLNLFDPNKYVDVNNIGIRGYMYLKGPRGSVATTNIYLNSTLYMGTKFIIKKYASGNEDNIVRNNDRVYINVVVKNKEYRLATNASQAGVEKILSALEIPDVGNLSQVVVMKSKDDQGIRNKCKMNLQDNNGNDIGFVGFHLYDNIAKLVASNWYNRQVGKASRTFGCSWEFIPVDDGWGESSL

SEQ ID NO: 52 - protein, 1292 aa, Artificial Sequence
  Modified BoNT/A3 (M1140I) Polypeptide Sequence
MPFVNKPFNYRDPGNGVDIAYIKIPNAGQMQPVKAFKIHEGVWVIPERDTFTNPEEGDLNPPPEAKQVPVSYYDSTYLSTDNEKDNYLKGVIKLFDRIYSTGLGRMLLSFIVKGIPFWGGSTIDTELKVIDTNCINVIEPGGSYRSEELNLVITGPSADIIQFECKSFGHDVFNLTRNGYGSTQYIRFSPDFTFGFEESLEVDTNPLLGAGTFATDPAVTLAHELIHAAHRLYGIAINPNRVLKVKTNAYYEMSGLEVSFEELRTFGGNDTNFIDSLWQKKFSRDAYDNLQNIARILNEAKTIVGTTTPLQYMKNIFIRKYFLSEDASGKISVNKAAFKEFYRVLTRGFTELEFVNPFKVINRKTYLNFDKAVFRINIVPDENYTINEGFNLEGANSNGQNTEINSRNFTRLKNFTGLFEFYKLLCVRGIIPFKTKSLDEGYNKALNYLCIKVNNWDLFFSPSEDNFTNDLDKVEEITADTNIEAAEENISSDLIQQYYLTFDFDNEPENISIENLSSDIIGQLEPMPNIERFPNGKKYELDKYTMFHYLRAQEFEHGDSRIILTNSAEEALLKPNVAYTFFSSKYVKKINKAVEAVIFLSWAEELVYDFTDETNEVTTMDKIADITIIVPYIGPALNIGNMVSKGEFVEAILFTGVVALLEFIPEYSLPVFGTFAIVSYIANKVLTVQTINNALSKRNEKWDEVYKYTVTNWLAKVNTQIDLIREKMKKALENQAEATRAIINYQYNQYTEEEKNNINFNIDDLSSKLNRSINRAMININKFLDQCSVSYLMNSMIPYAVKRLKDFDASVRDVLLKYIYDNRGTLILQVDRLKDEVNNTLSADIPFQLSKYVNDKKLLSTFTEYIKNIVNTSILSIVYKKDDLIDLSRYGAKINIGDRVYYDSIDKNQIKLINLESSTIEVILKNAIVYNSMYENFSTSFWIKIPKYFSKINLNNEYTIINCIENNSGWKVSLNYGEIIWTLQDNKQNIQRVVFKYSQMVNISDYINRWMFVTITNNRLTKSKIYINGRLIDQKPISNLGNIHASNKIMFKLDGCRDPRRYIMIKYFNLFDKELNEKEIKDLYDSQSNPGILKDFWGNYLQYDKPYYMLNLFDPNKYVDVNNIGIRGYMYLKGPRGSVITTNIYLNSTLYMGTKFIIKKYASGNEDNIVRNNDRVYINVVVKNKEYRLATNASQAGVEKILSALEIPDVGNLSQVVVMKSKDDQGIRNKCKMNLQDNNGNDIGFVGFHLYDNIAKLVASNWYNRQVGKASRTFGCSWEFIPVDDGWGESSL

SEQ ID NO: 53 - protein, 1291 aa, Artificial Sequence
  Modified BoNT/A3 (M1140 Deletion) Polypeptide Sequence
MPFVNKPFNYRDPGNGVDIAYIKIPNAGQMQPVKAFKIHEGVWVIPERDTFTNPEEGDLNPPPEAKQVPVSYYDSTYLSTDNEKDNYLKGVIKLFDRIYSTGLGRMLLSFIVKGIPFWGGSTIDTELKVIDTNCINVIEPGGSYRSEELNLVITGPSADIIQFECKSFGHDVFNLTRNGYGSTQYIRFSPDFTFGFEESLEVDTNPLLGAGTFATDPAVTLAHELIHAAHRLYGIAINPNRVLKVKTNAYYEMSGLEVSFEELRTFGGNDTNFIDSLWQKKFSRDAYDNLQNIARILNEAKTIVGTTTPLQYMKNIFIRKYFLSEDASGKISVNKAAFKEFYRVLTRGFTELEFVNPFKVINRKTYLNFDKAVFRINIVPDENYTINEGFNLEGANSNGQNTEINSRNFTRLKNFTGLFEFYKLLCVRGIIPFKTKSLDEGYNKALNYLCIKVNNWDLFFSPSEDNFTNDLDKVEEITADTNIEAAEENISSDLIQQYYLTFDFDNEPENISIENLSSDIIGQLEPMPNIERFPNGKKYELDKYTMFHYLRAQEFEHGDSRIILTNSAEEALLKPNVAYTFFSSKYVKKINKAVEAVIFLSWAEELVYDFTDETNEVTTMDKIADITIIVPYIGPALNIGNMVSKGEFVEAILFTGVVALLEFIPEYSLPVFGTFAIVSYIANKVLTVQTINNALSKRNEKWDEVYKYTVTNWLAKVNTQIDLIREKMKKALENQAEATRAIINYQYNQYTEEEKNNINFNIDDLSSKLNRSINRAMININKFLDQCSVSYLMNSMIPYAVKRLKDFDASVRDVLLKYIYDNRGTLILQVDRLKDEVNNTLSADIPFQLSKYVNDKKLLSTFTEYIKNIVNTSILSIVYKKDDLIDLSRYGAKINIGDRVYYDSIDKNQIKLINLESSTIEVILKNAIVYNSMYENFSTSFWIKIPKYFSKINLNNEYTIINCIENNSGWKVSLNYGEIIWTLQDNKQNIQRVVFKYSQMVNISDYINRWMFVTITNNRLTKSKIYINGRLIDQKPISNLGNIHASNKIMFKLDGCRDPRRYIMIKYFNLFDKELNEKEIKDLYDSQSNPGILKDFWGNYLQYDKPYYMLNLFDPNKYVDVNNIGIRGYMYLKGPRGSVTTNIYLNSTLYMGTKFIIKKYASGNEDNIVRNNDRVYINVVVKNKEYRLATNASQAGVEKILSALEIPDVGNLSQVVVMKSKDDQGIRNKCKMNLQDNNGNDIGFVGFHLYDNIAKLVASNWYNRQVGKASRTFGCSWEFIPVDDGWGESSL

SEQ ID NO: 54 - protein, 1296 aa, Clostridium botulinum
MPLVNQQINYYDPVNGVDIAYIKIPNAGKMQPVKAFKIHNKVWVIPERDIFTNPEEVDLNPPPEAKQVPISYYDSAYLSTDNEKDNYLKGVIKLFERIYSTDLGRMLLISIVRGIPFWGGGKIDTELKVIDTNCINIIQLDDSYRSEELNLAIIGPSANIIESQCSSFRDDVLNLTRNGYGSTQYIRFSPDFTVGFEESLEVDTNPLLGAGKFAQDPAVALAHELIHAEHRLYGIAINTNRVFKVNTNAYYEMAGLEVSLEELITFGGNDAKFIDSLQKKEFSLYYYNKFKDIASTLNKAKSIVGTTASLQYMKNVFKEKYLLSEDATGKFLVDRLKFDELYKLLTEIYTEDNFVKFFKVLNRKTYLNFDKAVFKINIVPDVNYTIHDGFNLRNTNLAANFNGQNIEINNKNFDKLKNFTGLFEFYKLLCVRGIITSKTKSLDEGYNKALNELCIKVNNWDLFFSPSEDNFTNDLDKVEEITSDTNIEAAEENISLDLIQQYYLNFNFDNEPENTSIENLSSDIIGQLEPMPNIERFPNGKKYELNKYTMFHYLRAQEFKHSNSRIILTNSAKEALLKPNIVYTFFSSKYIKAINKAVEAVTFVNWIENLVYDFTDETNEVSTMDKIADITIVIPYIGPALNIGNMIYKGEFVEAIIFSGAVILLEIVPEIALPVLGTFALVSYVSNKVLTVQTIDNALSKRNEKWDEVYKYIVTNWLAIVNTQINLIREKMKKALENQAEATKAIINYQYNQYTEEEKNNINFNIDDLSSKLNESINSAMININKFLDQCSVSYLMNSMIPYAVKRLKDFDASVRDVLLKYIYDNRGTLIGQVNRLKDKVNNTLSADIPFQLSKYVDNKKLLSTFTEYIKNITNASILSIVYKDDDLIDLSRYGAEIYNGDKVYYNSIDKNQIRLINLESSTIEVILKKAIVYNSMYENFSTSFWIRIPKYFNSISLNNEYTIINCMENNSGWKVSLNYGEIIWTFQDTQEIKQRVVFKYSQMINISDYINRWIFVTITNNRITKSKIYINGRLIDQKPISNLGNIHASNKIMFKLDGCRDPHRYIVIKYFNLFDKELSEKEIKDLYDNQSNSGILKDFWGDYLQYDKSYYMLNLYDPNKYVDVNNVGIRGYMYLKGPRDNVMTTNIYLNSSLYMGTKFIIKKYASGNKDNIVRNNDRVYINVVVKNKEYRLATNASQAGVEKILSALEIPDVGNLSQVVVMKSKNDQGITNKCKMNLQDNNGNDIGFIGFHQFNNIAKLVASNWYNRQIERSSRTLGCSWEFIPVDDGWRERPL

SEQ ID NO: 55 - protein, 1296 aa, Artificial Sequence
  Modified BoNT/A4 (M1144V) Polypeptide Sequence
MPLVNQQINYYDPVNGVDIAYIKIPNAGKMQPVKAFKIHNKVWVIPERDIFTNPEEVDLNPPPEAKQVPISYYDSAYLSTDNEKDNYLKGVIKLFERIYSTDLGRMLLISIVRGIPFWGGGKIDTELKVIDTNCINIIQLDDSYRSEELNLAIIGPSANIIESQCSSFRDDVLNLTRNGYGSTQYIRFSPDFTVGFEESLEVDTNPLLGAGKFAQDPAVALAHELIHAEHRLYGIAINTNRVFKVNTNAYYEMAGLEVSLEELITFGGNDAKFIDSLQKKEFSLYYYNKFKDIASTLNKAKSIVGTTASLQYMKNVFKEKYLLSEDATGKFLVDRLKFDELYKLLTEIYTEDNFVKFFKVLNRKTYLNFDKAVFKINIVPDVNYTIHDGFNLRNTNLAANFNGQNIEINNKNFDKLKNFTGLFEFYKLLCVRGIITSKTKSLDEGYNKALNELCIKVNNWDLFFSPSEDNFTNDLDKVEEITSDTNIEAAEENISLDLIQQYYLNFNFDNEPENTSIENLSSDIIGQLEPMPNIERFPNGKKYELNKYTMFHYLRAQEFKHSNSRIILTNSAKEALLKPNIVYTFFSSKYIKAINKAVEAVTFVNWIENLVYDFTDETNEVSTMDKIADITIVIPYIGPALNIGNMIYKGEFVEAIIFSGAVILLEIVPEIALPVLGTFALVSYVSNKVLTVQTIDNALSKRNEKWDEVYKYIVTNWLAIVNTQINLIREKMKKALENQAEATKAIINYQYNQYTEEEKNNINFNIDDLSSKLNESINSAMININKFLDQCSVSYLMNSMIPYAVKRLKDFDASVRDVLLKYIYDNRGTLIGQVNRLKDKVNNTLSADIPFQLSKYVDNKKLLSTFTEYIKNITNASILSIVYKDDDLIDLSRYGAEIYNGDKVYYNSIDKNQIRLINLESSTIEVILKKAIVYNSMYENFSTSFWIRIPKYFNSISLNNEYTIINCMENNSGWKVSLNYGEIIWTFQDTQEIKQRVVFKYSQMINISDYINRWIFVTITNNRITKSKIYINGRLIDQKPISNLGNIHASNKIMFKLDGCRDPHRYIVIKYFNLFDKELSEKEIKDLYDNQSNSGILKDFWGDYLQYDKSYYMLNLYDPNKYVDVNNVGIRGYMYLKGPRDNVVTTNIYLNSSLYMGTKFIIKKYASGNKDNIVRNNDRVYINVVVKNKEYRLATNASQAGVEKILSALEIPDVGNLSQVVVMKSKNDQGITNKCKMNLQDNNGNDIGFIGFHQFNNIAKLVASNWYNRQIERSSRTLGCSWEFIPVDDGWRERPL

SEQ ID NO: 56 - protein, 1296 aa, Artificial Sequence
  Modified BoNT/A4 (M1144G) Polypeptide Sequence
MPLVNQQINYYDPVNGVDIAYIKIPNAGKMQPVKAFKIHNKVWVIPERDIFTNPEEVDLNPPPEAKQVPISYYDSAYLSTDNEKDNYLKGVIKLFERIYSTDLGRMLLISIVRGIPFWGGGKIDTELKVIDTNCINIIQLDDSYRSEELNLAIIGPSANIIESQCSSFRDDVLNLTRNGYGSTQYIRFSPDFTVGFEESLEVDTNPLLGAGKFAQDPAVALAHELIHAEHRLYGIAINTNRVFKVNTNAYYEMAGLEVSLEELITFGGNDAKFIDSLQKKEFSLYYYNKFKDIASTLNKAKSIVGTTASLQYMKNVFKEKYLLSEDATGKFLVDRLKFDELYKLLTEIYTEDNFVKFFKVLNRKTYLNFDKAVFKINIVPDVNYTIHDGFNLRNTNLAANFNGQNIEINNKNFDKLKNFTGLFEFYKLLCVRGIITSKTKSLDEGYNKALNELCIKVNNWDLFFSPSEDNFTNDLDKVEEITSDTNIEAAEENISLDLIQQYYLNFNFDNEPENTSIENLSSDIIGQLEPMPNIERFPNGKKYELNKYTMFHYLRAQEFKHSNSRIILTNSAKEALLKPNIVYTFFSSKYIKAINKAVEAVTFVNWIENLVYDFTDETNEVSTMDKIADITIVIPYIGPALNIGNMIYKGEFVEAIIFSGAVILLEIVPEIALPVLGTFALVSYVSNKVLTVQTIDNALSKRNEKWDEVYKYIVTNWLAIVNTQINLIREKMKKALENQAEATKAIINYQYNQYTEEEKNNINFNIDDLSSKLNESINSAMININKFLDQCSVSYLMNSMIPYAVKRLKDFDASVRDVLLKYIYDNRGTLIGQVNRLKDKVNNTLSADIPFQLSKYVDNKKLLSTFTEYIKNITNASILSIVYKDDDLIDLSRYGAEIYNGDKVYYNSIDKNQIRLINLESSTIEVILKKAIVYNSMYENFSTSFWIRIPKYFNSISLNNEYTIINCMENNSGWKVSLNYGEIIWTFQDTQEIKQRVVFKYSQMINISDYINRWIFVTITNNRITKSKIYINGRLIDQKPISNLGNIHASNKIMFKLDGCRDPHRYIVIKYFNLFDKELSEKEIKDLYDNQSNSGILKDFWGDYLQYDKSYYMLNLYDPNKYVDVNNVGIRGYMYLKGPRDNVGTTNIYLNSSLYMGTKFIIKKYASGNKDNIVRNNDRVYINVVVKNKEYRLATNASQAGVEKILSALEIPDVGNLSQVVVMKSKNDQGITNKCKMNLQDNNGNDIGFIGFHQFNNIAKLVASNWYNRQIERSSRTLGCSWEFIPVDDGWRERPL

SEQ ID NO: 57 - protein, 1296 aa, Artificial Sequence
  Modified BoNT/A4 (M1144L) Polypeptide Sequence
MPLVNQQINYYDPVNGVDIAYIKIPNAGKMQPVKAFKIHNKVWVIPERDIFTNPEEVDLNPPPEAKQVPISYYDSAYLSTDNEKDNYLKGVIKLFERIYSTDLGRMLLISIVRGIPFWGGGKIDTELKVIDTNCINIIQLDDSYRSEELNLAIIGPSANIIESQCSSFRDDVLNLTRNGYGSTQYIRFSPDFTVGFEESLEVDTNPLLGAGKFAQDPAVALAHELIHAEHRLYGIAINTNRVFKVNTNAYYEMAGLEVSLEELITFGGNDAKFIDSLQKKEFSLYYYNKFKDIASTLNKAKSIVGTTASLQYMKNVFKEKYLLSEDATGKFLVDRLKFDELYKLLTEIYTEDNFVKFFKVLNRKTYLNFDKAVFKINIVPDVNYTIHDGFNLRNTNLAANFNGQNIEINNKNFDKLKNFTGLFEFYKLLCVRGIITSKTKSLDEGYNKALNELCIKVNNWDLFFSPSEDNFTNDLDKVEEITSDTNIEAAEENISLDLIQQYYLNFNFDNEPENTSIENLSSDIIGQLEPMPNIERFPNGKKYELNKYTMFHYLRAQEFKHSNSRIILTNSAKEALLKPNIVYTFFSSKYIKAINKAVEAVTFVNWIENLVYDFTDETNEVSTMDKIADITIVIPYIGPALNIGNMIYKGEFVEAIIFSGAVILLEIVPEIALPVLGTFALVSYVSNKVLTVQTIDNALSKRNEKWDEVYKYIVTNWLAIVNTQINLIREKMKKALENQAEATKAIINYQYNQYTEEEKNNINFNIDDLSSKLNESINSAMININKFLDQCSVSYLMNSMIPYAVKRLKDFDASVRDVLLKYIYDNRGTLIGQVNRLKDKVNNTLSADIPFQLSKYVDNKKLLSTFTEYIKNITNASILSIVYKDDDLIDLSRYGAEIYNGDKVYYNSIDKNQIRLINLESSTIEVILKKAIVYNSMYENFSTSFWIRIPKYFNSISLNNEYTIINCMENNSGWKVSLNYGEIIWTFQDTQEIKQRVVFKYSQMINISDYINRWIFVTITNNRITKSKIYINGRLIDQKPISNLGNIHASNKIMFKLDGCRDPHRYIVIKYFNLFDKELSEKEIKDLYDNQSNSGILKDFWGDYLQYDKSYYMLNLYDPNKYVDVNNVGIRGYMYLKGPRDNVLTTNIYLNSSLYMGTKFIIKKYASGNKDNIVRNNDRVYINVVVKNKEYRLATNASQAGVEKILSALEIPDVGNLSQVVVMKSKNDQGITNKCKMNLQDNNGNDIGFIGFHQFNNIAKLVASNWYNRQIERSSRTLGCSWEFIPVDDGWRERPL

SEQ ID NO: 58 - protein, 1296 aa, Artificial Sequence
  Modified BoNT/A4 (M1144T) Polypeptide Sequence
MPLVNQQINYYDPVNGVDIAYIKIPNAGKMQPVKAFKIHNKVWVIPERDIFTNPEEVDLNPPPEAKQVPISYYDSAYLSTDNEKDNYLKGVIKLFERIYSTDLGRMLLISIVRGIPFWGGGKIDTELKVIDTNCINIIQLDDSYRSEELNLAIIGPSANIIESQCSSFRDDVLNLTRNGYGSTQYIRFSPDFTVGFEESLEVDTNPLLGAGKFAQDPAVALAHELIHAEHRLYGIAINTNRVFKVNTNAYYEMAGLEVSLEELITFGGNDAKFIDSLQKKEFSLYYYNKFKDIASTLNKAKSIVGTTASLQYMKNVFKEKYLLSEDATGKFLVDRLKFDELYKLLTEIYTEDNFVKFFKVLNRKTYLNFDKAVFKINIVPDVNYTIHDGFNLRNTNLAANFNGQNIEINNKNFDKLKNFTGLFEFYKLLCVRGIITSKTKSLDEGYNKALNELCIKVNNWDLFFSPSEDNFTNDLDKVEEITSDTNIEAAEENISLDLIQQYYLNFNFDNEPENTSIENLSSDIIGQLEPMPNIERFPNGKKYELNKYTMFHYLRAQEFKHSNSRIILTNSAKEALLKPNIVYTFFSSKYIKAINKAVEAVTFVNWIENLVYDFTDETNEVSTMDKIADITIVIPYIGPALNIGNMIYKGEFVEAIIFSGAVILLEIVPEIALPVLGTFALVSYVSNKVLTVQTIDNALSKRNEKWDEVYKYIVTNWLAIVNTQINLIREKMKKALENQAEATKAIINYQYNQYTEEEKNNINFNIDDLSSKLNESINSAMININKFLDQCSVSYLMNSMIPYAVKRLKDFDASVRDVLLKYIYDNRGTLIGQVNRLKDKVNNTLSADIPFQLSKYVDNKKLLSTFTEYIKNITNASILSIVYKDDDLIDLSRYGAEIYNGDKVYYNSIDKNQIRLINLESSTIEVILKKAIVYNSMYENFSTSFWIRIPKYFNSISLNNEYTIINCMENNSGWKVSLNYGEIIWTFQDTQEIKQRVVFKYSQMINISDYINRWIFVTITNNRITKSKIYINGRLIDQKPISNLGNIHASNKIMFKLDGCRDPHRYIVIKYFNLFDKELSEKEIKDLYDNQSNSGILKDFWGDYLQYDKSYYMLNLYDPNKYVDVNNVGIRGYMYLKGPRDNVTTTNIYLNSSLYMGTKFIIKKYASGNKDNIVRNNDRVYINVVVKNKEYRLATNASQAGVEKILSALEIPDVGNLSQVVVMKSKNDQGITNKCKMNLQDNNGNDIGFIGFHQFNNIAKLVASNWYNRQIERSSRTLGCSWEFIPVDDGWRERPL

SEQ ID NO: 59 - protein, 1296 aa, Artificial Sequence
  Modified BoNT/A4 (M1144A) Polypeptide Sequence
MPLVNQQINYYDPVNGVDIAYIKIPNAGKMQPVKAFKIHNKVWVIPERDIFTNPEEVDLNPPPEAKQVPISYYDSAYLSTDNEKDNYLKGVIKLFERIYSTDLGRMLLISIVRGIPFWGGGKIDTELKVIDTNCINIIQLDDSYRSEELNLAIIGPSANIIESQCSSFRDDVLNLTRNGYGSTQYIRFSPDFTVGFEESLEVDTNPLLGAGKFAQDPAVALAHELIHAEHRLYGIAINTNRVFKVNTNAYYEMAGLEVSLEELITFGGNDAKFIDSLQKKEFSLYYYNKFKDIASTLNKAKSIVGTTASLQYMKNVFKEKYLLSEDATGKFLVDRLKFDELYKLLTEIYTEDNFVKFFKVLNRKTYLNFDKAVFKINIVPDVNYTIHDGFNLRNTNLAANFNGQNIEINNKNFDKLKNFTGLFEFYKLLCVRGIITSKTKSLDEGYNKALNELCIKVNNWDLFFSPSEDNFTNDLDKVEEITSDTNIEAAEENISLDLIQQYYLNFNFDNEPENTSIENLSSDIIGQLEPMPNIERFPNGKKYELNKYTMFHYLRAQEFKHSNSRIILTNSAKEALLKPNIVYTFFSSKYIKAINKAVEAVTFVNWIENLVYDFTDETNEVSTMDKIADITIVIPYIGPALNIGNMIYKGEFVEAIIFSGAVILLEIVPEIALPVLGTFALVSYVSNKVLTVQTIDNALSKRNEKWDEVYKYIVTNWLAIVNTQINLIREKMKKALENQAEATKAIINYQYNQYTEEEKNNINFNIDDLSSKLNESINSAMININKFLDQCSVSYLMNSMIPYAVKRLKDFDASVRDVLLKYIYDNRGTLIGQVNRLKDKVNNTLSADIPFQLSKYVDNKKLLSTFTEYIKNITNASILSIVYKDDDLIDLSRYGAEIYNGDKVYYNSIDKNQIRLINLESSTIEVILKKAIVYNSMYENFSTSFWIRIPKYFNSISLNNEYTIINCMENNSGWKVSLNYGEIIWTFQDTQEIKQRVVFKYSQMINISDYINRWIFVTITNNRITKSKIYINGRLIDQKPISNLGNIHASNKIMFKLDGCRDPHRYIVIKYFNLFDKELSEKEIKDLYDNQSNSGILKDFWGDYLQYDKSYYMLNLYDPNKYVDVNNVGIRGYMYLKGPRDNVATTNIYLNSSLYMGTKFIIKKYASGNKDNIVRNNDRVYINVVVKNKEYRLATNASQAGVEKILSALEIPDVGNLSQVVVMKSKNDQGITNKCKMNLQDNNGNDIGFIGFHQFNNIAKLVASNWYNRQIERSSRTLGCSWEFIPVDDGWRERPL

SEQ ID NO: 60 - protein, 1296 aa, Artificial Sequence
  Modified BoNT/A4 (M1144I) Polypeptide Sequence
MPLVNQQINYYDPVNGVDIAYIKIPNAGKMQPVKAFKIHNKVWVIPERDIFTNPEEVDLNPPPEAKQVPISYYDSAYLSTDNEKDNYLKGVIKLFERIYSTDLGRMLLISIVRGIPFWGGGKIDTELKVIDTNCINIIQLDDSYRSEELNLAIIGPSANIIESQCSSFRDDVLNLTRNGYGSTQYIRFSPDFTVGFEESLEVDTNPLLGAGKFAQDPAVALAHELIHAEHRLYGIAINTNRVFKVNTNAYYEMAGLEVSLEELITFGGNDAKFIDSLQKKEFSLYYYNKFKDIASTLNKAKSIVGTTASLQYMKNVFKEKYLLSEDATGKFLVDRLKFDELYKLLTEIYTEDNFVKFFKVLNRKTYLNFDKAVFKINIVPDVNYTIHDGFNLRNTNLAANFNGQNIEINNKNFDKLKNFTGLFEFYKLLCVRGIITSKTKSLDEGYNKALNELCIKVNNWDLFFSPSEDNFTNDLDKVEEITSDTNIEAAEENISLDLIQQYYLNFNFDNEPENTSIENLSSDIIGQLEPMPNIERFPNGKKYELNKYTMFHYLRAQEFKHSNSRIILTNSAKEALLKPNIVYTFFSSKYIKAINKAVEAVTFVNWIENLVYDFTDETNEVSTMDKIADITIVIPYIGPALNIGNMIYKGEFVEAIIFSGAVILLEIVPEIALPVLGTFALVSYVSNKVLTVQTIDNALSKRNEKWDEVYKYIVTNWLAIVNTQINLIREKMKKALENQAEATKAIINYQYNQYTEEEKNNINFNIDDLSSKLNESINSAMININKFLDQCSVSYLMNSMIPYAVKRLKDFDASVRDVLLKYIYDNRGTLIGQVNRLKDKVNNTLSADIPFQLSKYVDNKKLLSTFTEYIKNITNASILSIVYKDDDLIDLSRYGAEIYNGDKVYYNSIDKNQIRLINLESSTIEVILKKAIVYNSMYENFSTSFWIRIPKYFNSISLNNEYTIINCMENNSGWKVSLNYGEIIWTFQDTQEIKQRVVFKYSQMINISDYINRWIFVTITNNRITKSKIYINGRLIDQKPISNLGNIHASNKIMFKLDGCRDPHRYIVIKYFNLFDKELSEKEIKDLYDNQSNSGILKDFWGDYLQYDKSYYMLNLYDPNKYVDVNNVGIRGYMYLKGPRDNVITTNIYLNSSLYMGTKFIIKKYASGNKDNIVRNNDRVYINVVVKNKEYRLATNASQAGVEKILSALEIPDVGNLSQVVVMKSKNDQGITNKCKMNLQDNNGNDIGFIGFHQFNNIAKLVASNWYNRQIERSSRTLGCSWEFIPVDDGWRERPL

SEQ ID NO: 61 - protein, 1295 aa, Artificial Sequence
  Modified BoNT/A4 (M1144 Deletion) Polypeptide Sequence
MPLVNQQINYYDPVNGVDIAYIKIPNAGKMQPVKAFKIHNKVWVIPERDIFTNPEEVDLNPPPEAKQVPISYYDSAYLSTDNEKDNYLKGVIKLFERIYSTDLGRMLLISIVRGIPFWGGGKIDTELKVIDTNCINIIQLDDSYRSEELNLAIIGPSANIIESQCSSFRDDVLNLTRNGYGSTQYIRFSPDFTVGFEESLEVDTNPLLGAGKFAQDPAVALAHELIHAEHRLYGIAINTNRVFKVNTNAYYEMAGLEVSLEELITFGGNDAKFIDSLQKKEFSLYYYNKFKDIASTLNKAKSIVGTTASLQYMKNVFKEKYLLSEDATGKFLVDRLKFDELYKLLTEIYTEDNFVKFFKVLNRKTYLNFDKAVFKINIVPDVNYTIHDGFNLRNTNLAANFNGQNIEINNKNFDKLKNFTGLFEFYKLLCVRGIITSKTKSLDEGYNKALNELCIKVNNWDLFFSPSEDNFTNDLDKVEEITSDTNIEAAEENISLDLIQQYYLNFNFDNEPENTSIENLSSDIIGQLEPMPNIERFPNGKKYELNKYTMFHYLRAQEFKHSNSRIILTNSAKEALLKPNIVYTFFSSKYIKAINKAVEAVTFVNWIENLVYDFTDETNEVSTMDKIADITIVIPYIGPALNIGNMIYKGEFVEAIIFSGAVILLEIVPEIALPVLGTFALVSYVSNKVLTVQTIDNALSKRNEKWDEVYKYIVTNWLAIVNTQINLIREKMKKALENQAEATKAIINYQYNQYTEEEKNNINFNIDDLSSKLNESINSAMININKFLDQCSVSYLMNSMIPYAVKRLKDFDASVRDVLLKYIYDNRGTLIGQVNRLKDKVNNTLSADIPFQLSKYVDNKKLLSTFTEYIKNITNASILSIVYKDDDLIDLSRYGAEIYNGDKVYYNSIDKNQIRLINLESSTIEVILKKAIVYNSMYENFSTSFWIRIPKYFNSISLNNEYTIINCMENNSGWKVSLNYGEIIWTFQDTQEIKQRVVFKYSQMINISDYINRWIFVTITNNRITKSKIYINGRLIDQKPISNLGNIHASNKIMFKLDGCRDPHRYIVIKYFNLFDKELSEKEIKDLYDNQSNSGILKDFWGDYLQYDKSYYMLNLYDPNKYVDVNNVGIRGYMYLKGPRDNVTTNIYLNSSLYMGTKFIIKKYASGNKDNIVRNNDRVYINVVVKNKEYRLATNASQAGVEKILSALEIPDVGNLSQVVVMKSKNDQGITNKCKMNLQDNNGNDIGFIGFHQFNNIAKLVASNWYNRQIERSSRTLGCSWEFIPVDDGWRERPL

SEQ ID NO: 62 - protein, 186 aa, Clostridium botulinum
YYMLNLYDPNKYVDVNNVGIRGYMYLKGPRGSVMTTNIYLNSSLYRGTKFIIKKYASGNKDNIVRNNDRVYINVVVKNKEYRLATNASQAGVEKILSALEIPDVGNLSQVVVMKSKNDQGITNKCKMNLQDNNGNDIGFIGFHQFNNIAKLVASNWYNRQIERSSRTLGCSWEFIPVDDGWGERPL

SEQ ID NO: 63 - protein, 186 aa, Artificial Sequence
  Modified BoNT/A1 HCC domain (M1144V) Polypeptide Sequence
YYMLNLYDPNKYVDVNNVGIRGYMYLKGPRGSVVTTNIYLNSSLYRGTKFIIKKYASGNKDNIVRNNDRVYINVVVKNKEYRLATNASQAGVEKILSALEIPDVGNLSQVVVMKSKNDQGITNKCKMNLQDNNGNDIGFIGFHQFNNIAKLVASNWYNRQIERSSRTLGCSWEFIPVDDGWGERPL

SEQ ID NO: 64 - protein, 186 aa, Artificial Sequence
  Modified BoNT/A1 HCC domain (M1144G) Polypeptide Sequence
YYMLNLYDPNKYVDVNNVGIRGYMYLKGPRGSVGTTNIYLNSSLYRGTKFIIKKYASGNKDNIVRNNDRVYINVVVKNKEYRLATNASQAGVEKILSALEIPDVGNLSQVVVMKSKNDQGITNKCKMNLQDNNGNDIGFIGFHQFNNIAKLVASNWYNRQIERSSRTLGCSWEFIPVDDGWGERPL

SEQ ID NO: 65 - protein, 186 aa, Artificial Sequence
  Modified BoNT/A1 HCC domain (M1144L) Polypeptide Sequence
YYMLNLYDPNKYVDVNNVGIRGYMYLKGPRGSVLTTNIYLNSSLYRGTKFIIKKYASGNKDNIVRNNDRVYINVVVKNKEYRLATNASQAGVEKILSALEIPDVGNLSQVVVMKSKNDQGITNKCKMNLQDNNGNDIGFIGFHQFNNIAKLVASNWYNRQIERSSRTLGCSWEFIPVDDGWGERPL

SEQ ID NO: 66 - protein, 186 aa, Artificial Sequence
  Modified BoNT/A1 HCC domain (M1144T) Polypeptide Sequence
YYMLNLYDPNKYVDVNNVGIRGYMYLKGPRGSVTTTNIYLNSSLYRGTKFIIKKYASGNKDNIVRNNDRVYINVVVKNKEYRLATNASQAGVEKILSALEIPDVGNLSQVVVMKSKNDQGITNKCKMNLQDNNGNDIGFIGFHQFNNIAKLVASNWYNRQIERSSRTLGCSWEFIPVDDGWGERPL

SEQ ID NO: 67 - protein, 186 aa, Artificial Sequence
  Modified BoNT/A1 HCC domain (M1144A) Polypeptide Sequence
YYMLNLYDPNKYVDVNNVGIRGYMYLKGPRGSVATTNIYLNSSLYRGTKFIIKKYASGNKDNIVRNNDRVYINVVVKNKEYRLATNASQAGVEKILSALEIPDVGNLSQVVVMKSKNDQGITNKCKMNLQDNNGNDIGFIGFHQFNNIAKLVASNWYNRQIERSSRTLGCSWEFIPVDDGWGERPL

SEQ ID NO: 68 - protein, 186 aa, Artificial Sequence
  Modified BoNT/A1 HCC domain (M1144I) Polypeptide Sequence
YYMLNLYDPNKYVDVNNVGIRGYMYLKGPRGSVITTNIYLNSSLYRGTKFIIKKYASGNKDNIVRNNDRVYINVVVKNKEYRLATNASQAGVEKILSALEIPDVGNLSQVVVMKSKNDQGITNKCKMNLQDNNGNDIGFIGFHQFNNIAKLVASNWYNRQIERSSRTLGCSWEFIPVDDGWGERPL

SEQ ID NO: 69 - protein, 185 aa, Artificial Sequence
  Modified BoNT/A1 HCC domain (M1144 Deletion) Polypeptide Sequence
YYMLNLYDPNKYVDVNNVGIRGYMYLKGPRGSVTTNIYLNSSLYRGTKFIIKKYASGNKDNIVRNNDRVYINVVVKNKEYRLATNASQAGVEKILSALEIPDVGNLSQVVVMKSKNDQGITNKCKMNLQDNNGNDIGFIGFHQFNNIAKLVASNWYNRQIERSSRTLGCSWEFIPVDDGWGERPL

SEQ ID NO: 70 - protein, 186 aa, Artificial Sequence
  BoNT/A1 HCC domain (Q1229K) Polypeptide Sequence
YYMLNLYDPNKYVDVNNVGIRGYMYLKGPRGSVMTTNIYLNSSLYRGTKFIIKKYASGNKDNIVRNNDRVYINVVVKNKEYRLATNASQAGVEKILSALEIPDVGNLSQVVVMKSKNDKGITNKCKMNLQDNNGNDIGFIGFHQFNNIAKLVASNWYNRQIERSSRTLGCSWEFIPVDDGWGERPL

SEQ ID NO: 71 - protein, 186 aa, Artificial Sequence
  Modified BoNT/A1 HCC domain (Q1229K, M1144V) Polypeptide Sequence
YYMLNLYDPNKYVDVNNVGIRGYMYLKGPRGSVVTTNIYLNSSLYRGTKFIIKKYASGNKDNIVRNNDRVYINVVVKNKEYRLATNASQAGVEKILSALEIPDVGNLSQVVVMKSKNDKGITNKCKMNLQDNNGNDIGFIGFHQFNNIAKLVASNWYNRQIERSSRTLGCSWEFIPVDDGWGERPL

SEQ ID NO: 72 - protein, 186 aa, Artificial Sequence
  Modified BoNT/A1 HCC domain (Q1229K, M1144G) Polypeptide Sequence
YYMLNLYDPNKYVDVNNVGIRGYMYLKGPRGSVGTTNIYLNSSLYRGTKFIIKKYASGNKDNIVRNNDRVYINVVVKNKEYRLATNASQAGVEKILSALEIPDVGNLSQVVVMKSKNDKGITNKCKMNLQDNNGNDIGFIGFHQFNNIAKLVASNWYNRQIERSSRTLGCSWEFIPVDDGWGERPL

SEQ ID NO: 73 - protein, 186 aa, Artificial Sequence
  Modified BoNT/A1 HCC domain (Q1229K, M1144L) Polypeptide Sequence
YYMLNLYDPNKYVDVNNVGIRGYMYLKGPRGSVLTTNIYLNSSLYRGTKFIIKKYASGNKDNIVRNNDRVYINVVVKNKEYRLATNASQAGVEKILSALEIPDVGNLSQVVVMKSKNDKGITNKCKMNLQDNNGNDIGFIGFHQFNNIAKLVASNWYNRQIERSSRTLGCSWEFIPVDDGWGERPL

SEQ ID NO: 74 - protein, 186 aa, Artificial Sequence
  Modified BoNT/A1 HCC domain (Q1229K, M1144T) Polypeptide Sequence
YYMLNLYDPNKYVDVNNVGIRGYMYLKGPRGSVTTTNIYLNSSLYRGTKFIIKKYASGNKDNIVRNNDRVYINVVVKNKEYRLATNASQAGVEKILSALEIPDVGNLSQVVVMKSKNDKGITNKCKMNLQDNNGNDIGFIGFHQFNNIAKLVASNWYNRQIERSSRTLGCSWEFIPVDDGWGERPL

SEQ ID NO: 75 - protein, 186 aa, Artificial Sequence
  Modified BoNT/A1 HCC domain (Q1229K, M1144A) Polypeptide Sequence
YYMLNLYDPNKYVDVNNVGIRGYMYLKGPRGSVATTNIYLNSSLYRGTKFIIKKYASGNKDNIVRNNDRVYINVVVKNKEYRLATNASQAGVEKILSALEIPDVGNLSQVVVMKSKNDKGITNKCKMNLQDNNGNDIGFIGFHQFNNIAKLVASNWYNRQIERSSRTLGCSWEFIPVDDGWGERPL

SEQ ID NO: 76 - protein, 186 aa, Artificial Sequence
  Modified BoNT/A1 HCC domain (Q1229K, M1144I) Polypeptide Sequence
YYMLNLYDPNKYVDVNNVGIRGYMYLKGPRGSVITTNIYLNSSLYRGTKFIIKKYASGNKDNIVRNNDRVYINVVVKNKEYRLATNASQAGVEKILSALEIPDVGNLSQVVVMKSKNDKGITNKCKMNLQDNNGNDIGFIGFHQFNNIAKLVASNWYNRQIERSSRTLGCSWEFIPVDDGWGERPL

SEQ ID NO: 77 - protein, 185 aa, Artificial Sequence
  Modified BoNT/A1 HCC domain (Q1229K, M1144 Deletion) Polypeptide Sequence
YYMLNLYDPNKYVDVNNVGIRGYMYLKGPRGSVTTNIYLNSSLYRGTKFIIKKYASGNKDNIVRNNDRVYINVVVKNKEYRLATNASQAGVEKILSALEIPDVGNLSQVVVMKSKNDKGITNKCKMNLQDNNGNDIGFIGFHQFNNIAKLVASNWYNRQIERSSRTLGCSWEFIPVDDGWGERPL

SEQ ID NO: 78 - protein, 186 aa, Artificial Sequence
  BoNT/A1 HCC domain (N1188R, D1213R, G1215R, N1216R, N1242R, N1243R, S1274R, T1277R) Polypeptide Sequence
YYMLNLYDPNKYVDVNNVGIRGYMYLKGPRGSVMTTNIYLNSSLYRGTKFIIKKYASGNKDNIVRNNDRVYINVVVKRKEYRLATNASQAGVEKILSALEIPRVRRLSQVVVMKSKNDQGITNKCKMNLQDRRGNDIGFIGFHQFNNIAKLVASNWYNRQIERRSRRLGCSWEFIPVDDGWGERPL

SEQ ID NO: 79 - protein, 186 aa, Artificial Sequence
  Modified BoNT/A1 HCC domain (N1188R, D1213R, G1215R, N1216R, N1242R, N1243R, S1274R, T1277R, M1144V) Polypeptide
YYMLNLYDPNKYVDVNNVGIRGYMYLKGPRGSVVTTNIYLNSSLYRGTKFIIKKYASGNKDNIVRNNDRVYINVVVKRKEYRLATNASQAGVEKILSALEIPRVRRLSQVVVMKSKNDQGITNKCKMNLQDRRGNDIGFIGFHQFNNIAKLVASNWYNRQIERRSRRLGCSWEFIPVDDGWGERPL

SEQ ID NO: 80 - protein, 186 aa, Artificial Sequence
  Modified BoNT/A1 HCC domain (N1188R, D1213R, G1215R, N1216R, N1242R, N1243R, S1274R, T1277R, M1144G) Polypeptide Sequence
YYMLNLYDPNKYVDVNNVGIRGYMYLKGPRGSVGTTNIYLNSSLYRGTKFIIKKYASGNKDNIVRNNDRVYINVVVKRKEYRLATNASQAGVEKILSALEIPRVRRLSQVVVMKSKNDQGITNKCKMNLQDRRGNDIGFIGFHQFNNIAKLVASNWYNRQIERRSRRLGCSWEFIPVDDGWGERPL

SEQ ID NO: 81 - protein, 186 aa, Artificial Sequence
  Modified BoNT/A1 HCC domain (N1188R, D1213R, G1215R, N1216R, N1242R, N1243R, S1274R, T1277R, M1144L) Polypeptide Sequence
YYMLNLYDPNKYVDVNNVGIRGYMYLKGPRGSVLTTNIYLNSSLYRGTKFIIKKYASGNKDNIVRNNDRVYINVVVKRKEYRLATNASQAGVEKILSALEIPRVRRLSQVVVMKSKNDQGITNKCKMNLQDRRGNDIGFIGFHQFNNIAKLVASNWYNRQIERRSRRLGCSWEFIPVDDGWGERPL

SEQ ID NO: 82 - protein, 186 aa, Artificial Sequence
  Modified BoNT/A1 HCC domain (N1188R, D1213R, G1215R, N1216R, N1242R, N1243R, S1274R, T1277R, M1144T) Polypeptide Sequence
YYMLNLYDPNKYVDVNNVGIRGYMYLKGPRGSVTTTNIYLNSSLYRGTKFIIKKYASGNKDNIVRNNDRVYINVVVKRKEYRLATNASQAGVEKILSALEIPRVRRLSQVVVMKSKNDQGITNKCKMNLQDRRGNDIGFIGFHQFNNIAKLVASNWYNRQIERRSRRLGCSWEFIPVDDGWGERPL

SEQ ID NO: 83 - protein, 186 aa, Artificial Sequence
  Modified BoNT/A1 HCC domain (N1188R, D1213R, G1215R, N1216R, N1242R, N1243R, S1274R, T1277R, M1144A) Polypeptide Sequence
YYMLNLYDPNKYVDVNNVGIRGYMYLKGPRGSVATTNIYLNSSLYRGTKFIIKKYASGNKDNIVRNNDRVYINVVVKRKEYRLATNASQAGVEKILSALEIPRVRRLSQVVVMKSKNDQGITNKCKMNLQDRRGNDIGFIGFHQFNNIAKLVASNWYNRQIERRSRRLGCSWEFIPVDDGWGERPL

SEQ ID NO: 84 - protein, 186 aa, Artificial Sequence
  Modified BoNT/A1 HCC domain (N1188R, D1213R, G1215R, N1216R, N1242R, N1243R, S1274R, T1277R, M1144I) Polypeptide Sequence
YYMLNLYDPNKYVDVNNVGIRGYMYLKGPRGSVITTNIYLNSSLYRGTKFIIKKYASGNKDNIVRNNDRVYINVVVKRKEYRLATNASQAGVEKILSALEIPRVRRLSQVVVMKSKNDQGITNKCKMNLQDRRGNDIGFIGFHQFNNIAKLVASNWYNRQIERRSRRLGCSWEFIPVDDGWGERPL

SEQ ID NO: 85 - protein, 185 aa, Artificial Sequence
  Modified BoNT/A1 HCC domain (N1188R, D1213R, G1215R, N1216R, N1242R, N1243R, S1274R, T1277R, M1144 Deletion) Polypeptide Sequence
YYMLNLYDPNKYVDVNNVGIRGYMYLKGPRGSVTTNIYLNSSLYRGTKFIIKKYASGNKDNIVRNNDRVYINVVVKRKEYRLATNASQAGVEKILSALEIPRVRRLSQVVVMKSKNDQGITNKCKMNLQDRRGNDIGFIGFHQFNNIAKLVASNWYNRQIERRSRRLGCSWEFIPVDDGWGERPL

SEQ ID NO: 86 - protein, 186 aa, Clostridium botulinum
YYMLNLFDPNKYVDVNNIGIRGYMYLKGPRGSVMTTNIYLNSTLYMGTKFIIKKYASGNEDNIVRNNDRVYINVVVKNKEYRLATNASQAGVEKILSALEIPDVGNLSQVVVMKSKDDQGIRNKCKMNLQDNNGNDIGFVGFHLYDNIAKLVASNWYNRQVGKASRTFGCSWEFIPVDDGWGESSL

SEQ ID NO: 87 - protein, 186 aa, Artificial Sequence
  Modified BoNT/A3 HCC domain (M1144V) Polypeptide Sequence
YYMLNLFDPNKYVDVNNIGIRGYMYLKGPRGSVVTTNIYLNSTLYMGTKFIIKKYASGNEDNIVRNNDRVYINVVVKNKEYRLATNASQAGVEKILSALEIPDVGNLSQVVVMKSKDDQGIRNKCKMNLQDNNGNDIGFVGFHLYDNIAKLVASNWYNRQVGKASRTFGCSWEFIPVDDGWGESSL

SEQ ID NO: 88 - protein, 186 aa, Artificial Sequence
  Modified BoNT/A3 HCC domain (M1144G) Polypeptide Sequence
YYMLNLFDPNKYVDVNNIGIRGYMYLKGPRGSVGTTNIYLNSTLYMGTKFIIKKYASGNEDNIVRNNDRVYINVVVKNKEYRLATNASQAGVEKILSALEIPDVGNLSQVVVMKSKDDQGIRNKCKMNLQDNNGNDIGFVGFHLYDNIAKLVASNWYNRQVGKASRTFGCSWEFIPVDDGWGESSL

SEQ ID NO: 89 - protein, 186 aa, Artificial Sequence
  Modified BoNT/A3 HCC domain (M1144L) Polypeptide Sequence
YYMLNLFDPNKYVDVNNIGIRGYMYLKGPRGSVLTTNIYLNSTLYMGTKFIIKKYASGNEDNIVRNNDRVYINVVVKNKEYRLATNASQAGVEKILSALEIPDVGNLSQVVVMKSKDDQGIRNKCKMNLQDNNGNDIGFVGFHLYDNIAKLVASNWYNRQVGKASRTFGCSWEFIPVDDGWGESSL

SEQ ID NO: 90 - protein, 186 aa, Artificial Sequence
  Modified BoNT/A3 HCC domain (M1144T) Polypeptide Sequence
YYMLNLFDPNKYVDVNNIGIRGYMYLKGPRGSVTTTNIYLNSTLYMGTKFIIKKYASGNEDNIVRNNDRVYINVVVKNKEYRLATNASQAGVEKILSALEIPDVGNLSQVVVMKSKDDQGIRNKCKMNLQDNNGNDIGFVGFHLYDNIAKLVASNWYNRQVGKASRTFGCSWEFIPVDDGWGESSL

SEQ ID NO: 91 - protein, 186 aa, Artificial Sequence
  Modified BoNT/A3 HCC domain (M1144A) Polypeptide Sequence
YYMLNLFDPNKYVDVNNIGIRGYMYLKGPRGSVATTNIYLNSTLYMGTKFIIKKYASGNEDNIVRNNDRVYINVVVKNKEYRLATNASQAGVEKILSALEIPDVGNLSQVVVMKSKDDQGIRNKCKMNLQDNNGNDIGFVGFHLYDNIAKLVASNWYNRQVGKASRTFGCSWEFIPVDDGWGESSL

SEQ ID NO: 92 - protein, 186 aa, Artificial Sequence
  Modified BoNT/A3 HCC domain (M1144I) Polypeptide Sequence
YYMLNLFDPNKYVDVNNIGIRGYMYLKGPRGSVITTNIYLNSTLYMGTKFIIKKYASGNEDNIVRNNDRVYINVVVKNKEYRLATNASQAGVEKILSALEIPDVGNLSQVVVMKSKDDQGIRNKCKMNLQDNNGNDIGFVGFHLYDNIAKLVASNWYNRQVGKASRTFGCSWEFIPVDDGWGESSL

SEQ ID NO: 93 - protein, 185 aa, Artificial Sequence
  Modified BoNT/A3 HCC domain (M1144 Deletion) Polypeptide Sequence
YYMLNLFDPNKYVDVNNIGIRGYMYLKGPRGSVTTNIYLNSTLYMGTKFIIKKYASGNEDNIVRNNDRVYINVVVKNKEYRLATNASQAGVEKILSALEIPDVGNLSQVVVMKSKDDQGIRNKCKMNLQDNNGNDIGFVGFHLYDNIAKLVASNWYNRQVGKASRTFGCSWEFIPVDDGWGESSL

SEQ ID NO: 94 - protein, 186 aa, Clostridium botulinum
YYMLNLYDPNKYVDVNNVGIRGYMYLKGPRDNVMTTNIYLNSSLYMGTKFIIKKYASGNKDNIVRNNDRVYINVVVKNKEYRLATNASQAGVEKILSALEIPDVGNLSQVVVMKSKNDQGITNKCKMNLQDNNGNDIGFIGFHQFNNIAKLVASNWYNRQIERSSRTLGCSWEFIPVDDGWRERPL

SEQ ID NO: 95 - protein, 186 aa, Artificial Sequence
  Modified BoNT/A4 HCC domain (M1144V) Polypeptide Sequence
YYMLNLYDPNKYVDVNNVGIRGYMYLKGPRDNVVTTNIYLNSSLYMGTKFIIKKYASGNKDNIVRNNDRVYINVVVKNKEYRLATNASQAGVEKILSALEIPDVGNLSQVVVMKSKNDQGITNKCKMNLQDNNGNDIGFIGFHQFNNIAKLVASNWYNRQIERSSRTLGCSWEFIPVDDGWRERPL

SEQ ID NO: 96 - protein, 186 aa, Artificial Sequence
  Modified BoNT/A4 HCC domain (M1144G) Polypeptide Sequence
YYMLNLYDPNKYVDVNNVGIRGYMYLKGPRDNVGTTNIYLNSSLYMGTKFIIKKYASGNKDNIVRNNDRVYINVVVKNKEYRLATNASQAGVEKILSALEIPDVGNLSQVVVMKSKNDQGITNKCKMNLQDNNGNDIGFIGFHQFNNIAKLVASNWYNRQIERSSRTLGCSWEFIPVDDGWRERPL

SEQ ID NO: 97 - protein, 186 aa, Artificial Sequence
  Modified BoNT/A4 HCC domain (M1144L) Polypeptide Sequence
YYMLNLYDPNKYVDVNNVGIRGYMYLKGPRDNVLTTNIYLNSSLYMGTKFIIKKYASGNKDNIVRNNDRVYINVVVKNKEYRLATNASQAGVEKILSALEIPDVGNLSQVVVMKSKNDQGITNKCKMNLQDNNGNDIGFIGFHQFNNIAKLVASNWYNRQIERSSRTLGCSWEFIPVDDGWRERPL

SEQ ID NO: 98 - protein, 186 aa, Artificial Sequence
  Modified BoNT/A4 HCC domain (M1144T) Polypeptide Sequence
YYMLNLYDPNKYVDVNNVGIRGYMYLKGPRDNVTTTNIYLNSSLYMGTKFIIKKYASGNKDNIVRNNDRVYINVVVKNKEYRLATNASQAGVEKILSALEIPDVGNLSQVVVMKSKNDQGITNKCKMNLQDNNGNDIGFIGFHQFNNIAKLVASNWYNRQIERSSRTLGCSWEFIPVDDGWRERPL

SEQ ID NO: 99 - protein, 186 aa, Artificial Sequence
  Modified BoNT/A4 HCC domain (M1144A) Polypeptide Sequence
YYMLNLYDPNKYVDVNNVGIRGYMYLKGPRDNVATTNIYLNSSLYMGTKFIIKKYASGNKDNIVRNNDRVYINVVVKNKEYRLATNASQAGVEKILSALEIPDVGNLSQVVVMKSKNDQGITNKCKMNLQDNNGNDIGFIGFHQFNNIAKLVASNWYNRQIERSSRTLGCSWEFIPVDDGWRERPL

SEQ ID NO: 100 - protein, 186 aa, Artificial Sequence
  Modified BoNT/A4 HCC domain (M1144I) Polypeptide Sequence
YYMLNLYDPNKYVDVNNVGIRGYMYLKGPRDNVITTNIYLNSSLYMGTKFIIKKYASGNKDNIVRNNDRVYINVVVKNKEYRLATNASQAGVEKILSALEIPDVGNLSQVVVMKSKNDQGITNKCKMNLQDNNGNDIGFIGFHQFNNIAKLVASNWYNRQIERSSRTLGCSWEFIPVDDGWRERPL

SEQ ID NO: 101 - protein, 185 aa, Artificial Sequence
  Modified BoNT/A4 HCC domain (M1144 Deletion) Polypeptide Sequence
YYMLNLYDPNKYVDVNNVGIRGYMYLKGPRDNVTTNIYLNSSLYMGTKFIIKKYASGNKDNIVRNNDRVYINVVVKNKEYRLATNASQAGVEKILSALEIPDVGNLSQVVVMKSKNDQGITNKCKMNLQDNNGNDIGFIGFHQFNNIAKLVASNWYNRQIERSSRTLGCSWEFIPVDDGWRERPL

SEQ ID NO: 102 - protein, 19 aa, Artificial Sequence
  Modified SV2 Binding Domain Consensus Sequence 1
  misc_feature (2)..(2): Xaa is Asp or Gly
  misc_feature (3)..(3): Xaa is Ser or Asn
  misc_feature (5)..(5): Xaa is an amino acid that is resistant to oxidation
  misc_feature (14)..(14): Xaa is Ser or Thr
  misc_feature (17)..(17): Xaa is Met or Arg
RXXVXTTNIYLNSXLYXGT

SEQ ID NO: 103 - protein, 19 aa, Clostridium botulinum
RGSVMTTNIYLNSSLYRGT

SEQ ID NO: 104 - protein, 19 aa, Clostridium botulinum
RGNVMTTNIYLNSSLYMGT

SEQ ID NO: 105 - protein, 19 aa, Clostridium botulinum
RGSVMTTNIYLNSTLYMGT

SEQ ID NO: 106 - protein, 19 aa, Clostridium botulinum
RDNVMTTNIYLNSSLYMGT

SEQ ID NO: 107 - protein, 19 aa, Artificial Sequence
  Modified SV2 Binding Domain Consensus Sequence 2
  misc_feature (5)..(5): Xaa is an amino acid that is resistant to oxidation
RGSVXTTNIYLNSSLYRGT

SEQ ID NO: 108 - protein, 19 aa, Artificial Sequence
  Modified SV2 Binding Domain Consensus Sequence 3
  misc_feature (5)..(5): Xaa is an amino acid that is resistant to oxidation
RGNVXTTNIYLNSSLYMGT

SEQ ID NO: 109 - protein, 19 aa, Artificial Sequence
  Modified SV2 Binding Domain Consensus Sequence 4
  misc_feature (5)..(5): Xaa is an amino acid that is resistant to oxidation
RGSVXTTNIYLNSTLYMGT

SEQ ID NO: 110 - protein, 19 aa, Artificial Sequence
  Modified SV2 Binding Domain Consensus Sequence 5
  misc_feature (5)..(5): Xaa is an amino acid that is resistant to oxidation
RDNVXTTNIYLNSSLYMGT

SEQ ID NO: 111 - protein, 18 aa, Artificial Sequence
  Modified SV2 Binding Domain Consensus Sequence 6
  misc_feature (2)..(2): Xaa is Asp or Gly
  misc_feature (3)..(3): Xaa is Ser or Asn
  misc_feature (13)..(13): Xaa is Ser or Thr
  misc_feature (16)..(16): Xaa is Met or Arg
RXXVTTNIYLNSXLYXGT

SEQ ID NO: 112 - protein, 18 aa, Artificial Sequence
  Modified SV2 Binding Domain A
RGSVTTNIYLNSSLYRGT

SEQ ID NO: 113 - protein, 18 aa, Artificial Sequence
  Modified SV2 Binding Domain B
RGNVTTNIYLNSSLYMGT

SEQ ID NO: 114 - protein, 18 aa, Artificial Sequence
  Modified SV2 Binding Domain C
RGSVTTNIYLNSTLYMGT

SEQ ID NO: 115 - protein, 18 aa, Artificial Sequence
  Modified SV2 Binding Domain D
RDNVTTNIYLNSSLYMGT

SEQ ID NO: 116 - protein, 23 aa, Influenza virus
GLFGAIAGFIENGWEGMIDGWYG

SEQ ID NO: 117 - protein, 7 aa, Artificial Sequence
  Leucine-Based Motif 1
  misc_feature (1)..(1): Xaa is any amino acid
  misc_feature (3)..(5): Xaa is any amino acid
XDXXXLL

SEQ ID NO: 118 - protein, 7 aa, Artificial Sequence
  Leucine-Based Motif 2
  misc_feature (1)..(1): Xaa is any amino acid
  misc_feature (3)..(5): Xaa is any amino acid
XEXXXLL

SEQ ID NO: 119 - protein, 7 aa, Artificial Sequence
  Leucine-Based Motif 3
  misc_feature (1)..(1): Xaa is any amino acid
  misc_feature (3)..(5): Xaa is any amino acid
XEXXXIL

SEQ ID NO: 120 - protein, 7 aa, Artificial Sequence
  Leucine-Based Motif 4
  misc_feature (1)..(1): Xaa is any amino acid
  misc_feature (3)..(5): Xaa is any amino acid
XEXXXLM

SEQ ID NO: 121 - protein, 4 aa, Artificial Sequence
  Tyrosine-based Motif
  misc_feature (2)..(3): Xaa is any amino acid
  VARIANT (4)..(4): Xaa is a hydrophobic amino acid
YXXX

SEQ ID NO: 122 - protein, 7 aa, Artificial Sequence
  TEV Cleavage Site
ENLYFQG

SEQ ID NO: 123 - protein, 6 aa, Artificial Sequence
  Thrombin Cleavage Site
LVPRGS

SEQ ID NO: 124 - protein, 8 aa, Artificial Sequence
  PreScission Cleavage Site
LEVLFQGP

SEQ ID NO: 125 - protein, 5 aa, Artificial Sequence
  Enterokinase Cleavage Site
DDDDK

SEQ ID NO: 126 - protein, 4 aa, Artificial Sequence
  Factor Xa Cleavage Site 1
IEGR

SEQ ID NO: 127 - protein, 4 aa, Artificial Sequence
  Factor Xa Cleavage Site 2
IDGR

SEQ ID NO: 128 - protein, 1291 aa, Clostridium botulinum
MPVTINNFNYNDPIDNNNIIMMEPPFARGTGRYYKAFKITDRIWIIPERYTFGYKPEDFNKSSGIFNRDVCEYYDPDYLNTNDKKNIFLQTMIKLFNRIKSKPLGEKLLEMIINGIPYLGDRRVPLEEFNTNIASVTVNKLISNPGEVERKKGIFANLIIFGPGPVLNENETIDIGIQNHFASREGFGGIMQMKFCPEYVSVFNNVQENKGASIFNRRGYFSDPALILMHELIHVLHGLYGIKVDDLPIVPNEKKFFMQSTDAIQAEELYTFGGQDPSIITPSTDKSIYDKVLQNFRGIVDRLNKVLVCISDPNININIYKNKFKDKYKFVEDSEGKYSIDVESFDKLYKSLMFGFTETNIAENYKIKTRASYFSDSLPPVKIKNLLDNEIYTIEEGFNISDKDMEKEYRGQNKAINKQAYEEISKEHLAVYKIQMCKSVKAPGICIDVDNEDLFFIADKNSFSDDLSKNERIEYNTQSNYIENDFPINELILDTDLISKIELPSENTESLTDFNVDVPVYEKQPAIKKIFTDENTIFQYLYSQTFPLDIRDISLTSSFDDALLFSNKVYSFFSMDYIKTANKVVEAGLFAGWVKQIVNDFVIEANKSNTMDKIADISLIVPYIGLALNVGNETAKGNFENAFEIAGASILLEFIPELLIPVVGAFLLESYIDNKNKIIKTIDNALTKRNEKWSDMYGLIVAQWLSTVNTQFYTIKEGMYKALNYQAQALEEIIKYRYNIYSEKEKSNINIDFNDINSKLNEGINQAIDNINNFINGCSVSYLMKKMIPLAVEKLLDFDNTLKKNLLNYIDENKLYLIGSAEYEKSKVNKYLKTIMPFDLSIYTNDTILIEMFNKYNSEILNNIILNLRYKDNNLIDLSGYGAKVEVYDGVELNDKNQFKLTSSANSKIRVTQNQNIIFNSVFLDFSVSFWIRIPKYKNDGIQNYIHNEYTIINCMKNNSGWKISIRGNRIIWTLIDINGKTKSVFFEYNIREDISEYINRWFFVTITNNLNNAKIYINGKLESNTDIKDIREVIANGEIIFKLDGDIDRTQFIWMKYFSIFNTELSQSNIEERYKIQSYSEYLKDFWGNPLMYNKEYYMFNAGNKNSYIKLKKDSPVGEILTRSKYNQNSKYINYRDLYIGEKFIIRRKSNSQSINDDIVRKEDYIYLDFFNLNQEWRVYTYKYFKKEEEKLFLAPISDSDEFYNTIQIKEYDEQPTYSCQLLFKKDEESTDEIGLIGIHRFYESGIVFEEYKDYFCISKWYLKEVKRKPYNLKLGCNWQFIPKDEGWTE

SEQ ID NO: 129 - protein, 1291 aa, Clostridium botulinum
MPITINNFNYSDPVDNKNILYLDTHLNTLANEPEKAFRITGNIWVIPDRFSRNSNPNLNKPPRVTSPKSGYYDPNYLSTDSDKDPFLKEIIKLFKRINSREIGEELIYRLSTDIPFPGNNNTPINTFDFDVDFNSVDVKTRQGNNWVKTGSINPSVIITGPRENIIDPETSTFKLTNNTFAAQEGFGALSIISISPRFMLTYSNATNDVGEGRFSKSEFCMDPILILMHELNHAMHNLYGIAIPNDQTISSVTSNIFYSQYNVKLEYAEIYAFGGPTIDLIPKSARKYFEEKALDYYRSIAKRLNSITTANPSSFNKYIGEYKQKLIRKYRFVVESSGEVTVNRNKFVELYNELTQIFTEFNYAKIYNVQNRKIYLSNVYTPVTANILDDNVYDIQNGFNIPKSNLNVLFMGQNLSRNPALRKVNPENMLYLFTKFCHKAIDGRSLYNKTLDCRELLVKNTDLPFIGDISDVKTDIFLRKDINEETEVIYYPDNVSVDQVILSKNTSEHGQLDLLYPSIDSESEILPGENQVFYDNRTQNVDYLNSYYYLESQKLSDNVEDFTFTRSIEEALDNSAKVYTYFPTLANKVNAGVQGGLFLMWANDVVEDFTTNILRKDTLDKISDVSAIIPYIGPALNISNSVRRGNFTEAFAVTGVTILLEAFPEFTIPALGAFVIYSKVQERNEIIKTIDNCLEQRIKRWKDSYEWMMGTWLSRIITQFNNISYQMYDSLNYQAGAIKAKIDLEYKKYSGSDKENIKSQVENLKNSLDVKISEAMNNINKFIRECSVTYLFKNMLPKVIDELNEFDRNTKAKLINLIDSHNIILVGEVDKLKAKVNNSFQNTIPFNIFSYTNNSLLKDIINEYFNNINDSKILSLQNRKNTLVDTSGYNAEVSEEGDVQLNPIFPFDFKLGSSGEDRGKVIVTQNENIVYNSMYESFSISFWIRINKWVSNLPGYTIIDSVKNNSGWSIGIISNFLVFTLKQNEDSEQSINFSYDISNNAPGYNKWFFVTVTNNMMGNMKIYINGKLIDTIKVKELTGINFSKTITFEINKIPDTGLITSDSDNINMWIRDFYIFAKELDGKDINILFNSLQYTNVVKDYWGNDLRYNKEYYMVNIDYLNRYMYANSRQIVFNTRRNNNDFNEGYKIIIKRIRGNTNDTRVRGGDILYFDMTINNKAYNLFMKNETMYADNHSTEDIYAIGLREQTKDINDNIIFQIQPMNNTYYYASQIFKSNFNGENISGICSIGTYRFRLGGDWYRHNYLVPTVKQGNYASLLESTSTHWGFVPVSE

SEQ ID NO: 130 - protein, 1276 aa, Clostridium botulinum
MTWPVKDFNYSDPVNDNDILYLRIPQNKLITTPVKAFMITQNIWVIPERFSSDTNPSLSKPPRPTSKYQSYYDPSYLSTDEQKDTFLKGIIKLFKRINERDIGKKLINYLVVGSPFMGDSSTPEDTFDFTRHTTNIAVEKFENGSWKVTNIITPSVLIFGPLPNILDYTASLTLQGQQSNPSFEGFGTLSILKVAPEFLLTFSDVTSNQSSAVLGKSIFCMDPVIALMHELTHSLHQLYGINIPSDKRIRPQVSEGFFSQDGPNVQFEELYTFGGLDVEIIPQIERSQLREKALGHYKDIAKRLNNINKTIPSSWISNIDKYKKIFSEKYNFDKDNTGNFVVNIDKFNSLYSDLTNVMSEVVYSSQYNVKNRTHYFSRHYLPVFANILDDNIYTIRDGFNLTNKGFNIENSGQNIERNPALQKLSSESVVDLFTKVCLRLTKNSRDDSTCIKVKNNRLPYVADKDSISQEIFENKIITDETNVQNYSDKFSLDESILDGQVPINPEIVDPLLPNVNMEPLNLPGEEIVFYDDITKYVDYLNSYYYLESQKLSNNVENITLTTSVEEALGYSNKIYTFLPSLAEKVNKGVQAGLFLNWANEVVEDFTTNIMKKDTLDKISDVSVIIPYIGPALNIGNSALRGNFNQAFATAGVAFLLEGFPEFTIPALGVFTFYSSIQEREKIIKTIENCLEQRVKRWKDSYQWMVSNWLSRITTQFNHINYQMYDSLSYQADAIKAKIDLEYKKYSGSDKENIKSQVENLKNSLDVKISEAMNNINKFIRECSVTYLFKNMLPKVIDELNKFDLRTKTELINLIDSHNIILVGEVDRLKAKVNESFENTMPFNIFSYTNNSLLKDIINEYFNSINDSKILSLQNKKNALVDTSGYNAEVRVGDNVQLNTIYTNDFKLSSSGDKIIVNLNNNILYSAIYENSSVSFWIKISKDLTNSHNEYTIINSIEQNSGWKLCIRNGNIEWILQDVNRKYKSLIFDYSESLSHTGYTNKWFFVTITNNIMGYMKLYINGELKQSQKIEDLDEVKLDKTIVFGIDENIDENQMLWIRDFNIFSKELSNEDINIVYEGQILRNVIKDYWGNPLKFDTEYYIINDNYIDRYIAPESNVLVLVQYPDRSKLYTGNPITIKSVSDKNPYSRILNGDNIILHMLYNSRKYMIIRDTDTIYATQGGECSQNCVYALKLQSNLGNYGIGIFSIKNIVSKNKYCSQIFSSFRENTMLLADIYKPWRFSFKNAYTPVAVTNYETKLLSTSSFWKFISRDPGWVE

SEQ ID NO: 131 - protein, 1251 aa, Clostridium botulinum
MPKINSFNYNDPVNDRTILYIKPGGCQEFYKSFNIMKNIWIIPERNVIGTTPQDFHPPTSLKNGDSSYYDPNYLQSDEEKDRFLKIVTKIFNRINNNLSGGILLEELSKANPYLGNDNTPDNQFHIGDASAVEIKFSNGSQDILLPNVIIMGAEPDLFETNSSNISLRNNYMPSNHRFGSIAIVTFSPEYSFRFNDNCMNEFIQDPALTLMHELIHSLHGLYGAKGITTKYTITQKQNPLITNIRGTNIEEFLTFGGTDLNIITSAQSNDIYTNLLADYKKIASKLSKVQVSNPLLNPYKDVFEAKYGLDKDASGIYSVNINKFNDIFKKLYSFTEFDLRTKFQVKCRQTYIGQYKYFKLSNLLNDSIYNISEGYNINNLKVNFRGQNANLNPRIITPITGRGLVKKIIRFCKNIVSVKGIRKSICIEINNGELFFVASENSYNDDNINTPKEIDDTVTSNNNYENDLDQVILNFNSESAPGLSDEKLNLTIQNDAYIPKYDSNGTSDIEQHDVNELNVFFYLDAQKVPEGENNVNLTSSIDTALLEQPKIYTFFSSEFINNVNKPVQAALFVSWIQQVLVDFTTEANQKSTVDKIADISIVVPYIGLALNIGNEAQKGNFKDALELLGAGILLEFEPELLIPTILVFTIKSFLGSSDNKNKVIKAINNALKERDEKWKEVYSFIVSNWMTKINTQFNKRKEQMYQALQNQVNAIKTIIESKYNSYTLEEKNELTNKYDIKQIENELNQKVSIAMNNIDRFLTESSISYLMKIINEVKINKLREYDENVKTYLLNYIIQHGSILGESQQELNSMVTDTLNNSIPFKLSSYTDDKILISYFNKFFKRIKSSSVLNMRYKNDKYVDTSGYDSNININGDVYKYPTNKNQFGIYNDKLSEVNISQNDYIIYDNKYKNFSISFWVRIPNYDNKIVNVNNEYTIINCMRDNNSGWKVSLNHNEIIWTFEDNRGINQKLAFNYGNANGISDYINKWIFVTITNDRLGDSKLYINGNLIDQKSILNLGNIHVSDNILFKIVNCSYTRYIGIRYFNIFDKELDETEIQTLYSNEPNTNILKDFWGNYLLYDKEYYLLNVLKPNNFIDRRKDSTLSINNIRSTILLANRLYSGIKVKIQRVNNSSTNDNLVRKNDQVYINFVASKTHLFPLYADTATTNKEKTIKISSSGNRFNQVVVMNSVGNCTMNFKNNNGNNIGLLGFKADTVVASTWYYTHMRDHTNSNGCFWNFISEEHGWQEK

SEQ ID NO: 132 - protein, 1278 aa, Clostridium botulinum
MPVVINSFNYNDPVNDDTILYMQIPYEEKSKKYYKAFEIMRNVWIIPERNTIGTDPSDFDPPASLENGSSAYYDPNYLTTDAEKDRYLKTTIKLFKRINSNPAGEVLLQEISYAKPYLGNEHTPINEFHPVTRTTSVNIKSSTNVKSSIILNLLVLGAGPDIFENSSYPVRKLMDSGGVYDPSNDGFGSINIVTFSPEYEYTFNDISGGYNSSTESFIADPAISLAHELIHALHGLYGARGVTYKETIKVKQAPLMIAEKPIRLEEFLTFGGQDLNIITSAMKEKIYNNLLANYEKIATRLSRVNSAPPEYDINEYKDYFQWKYGLDKNADGSYTVNENKFNEIYKKLYSFTEIDLANKFKVKCRNTYFIKYGFLKVPNLLDDDIYTVSEGFNIGNLAVNNRGQNIKLNPKIIDSIPDKGLVEKIVKFCKSVIPRKGTKAPPRLCIRVNNRELFFVASESSYNENDINTPKEIDDTTNLNNNYRNNLDEVILDYNSETIPQISNQTLNTLVQDDSYVPRYDSNGTSEIEEHNVVDLNVFFYLHAQKVPEGETNISLTSSIDTALSEESQVYTFFSSEFINTINKPVHAALFISWINQVIRDFTTEATQKSTFDKIADISLVVPYVGLALNIGNEVQKENFKEAFELLGAGILLEFVPELLIPTILVFTIKSFIGSSENKNKIIKAINNSLMERETKWKEIYSWIVSNWLTRINTQFNKRKEQMYQALQNQVDAIKTVIEYKYNNYTSDERNRLESEYNINNIREELNKKVSLAMENIERFITESSIFYLMKLINEAKVSKLREYDEGVKEYLLDYISEHRSILGNSVQELNDLVTSTLNNSIPFELSSYTNDKILILYFNKLYKKIKDNSILDMRYENNKFIDISGYGSNISINGDVYIYSTNRNQFGIYSSKPSEVNIAQNNDIIYNGRYQNFSISFWVRIPKYFNKVNLNNEYTIIDCIRNNNSGWKISLNYNKIIWTLQDTAGNNQKLVFNYTQMISISDYINKWIFVTITNNRLGNSRIYINGNLIDEKSISNLGDIHVSDNILFKIVGCNDTRYVGIRYFKVFDTELGKTEIETLYSDEPDPSILKDFWGNYLLYNKRYYLLNLLRTDKSITQNSNFLNINQQRGVYQKPNIFSNTRLYTGVEVIIRKNGSTDISNTDNFVRKNDLAYINVVDRDVEYRLYADISIAKPEKIIKLIRTSNSNNSLGQIIVMDSIGNNCTMNFQNNNGGNIGLLGFHSNNLVASSWYYNNIRKNTSSNGCFWSFISKEHGWQEN

SEQ ID NO: 133 - protein, 1297 aa, Clostridium botulinum
  misc_feature (7)..(7): Xaa can be any naturally occurring amino acid
MPVNIKXFNYNDPINNDDIIMMEPFNDPGPGTYYKAFRIIDRIWIVPERFTYGFQPDQFNASTGVFSKDVYEYYDPTYLKTDAEKDKFLKTMIKLFNRINSKPSGQRLLDMIVDAIPYLGNASTPPDKFAANVANVSINKKIIQPGAEDQIKGLMTNLIIFGPGPVLSDNFTDSMIMNGHSPISEGFGARMMIRFCPSCLNVFNNVQENKDTSIFSRRAYFADPALTLMHELIHVLHGLYGIKISNLPITPNTKEFFMQHSDPVQAEELYTFGGHDPSVISPSTDMNIYNKALQNFQDIANRLNIVSSAQGSGIDISLYKQIYKNKYDFVEDPNGKYSVDKDKFDKLYKALMFGFTETNLAGEYGIKTRYSYFSEYLPPIKTEKLLDNTIYTQNEGFNIASKNLKTEFNGQNKAVNKEAYEEISLEHLVIYRIAMCKPVMYKNTGKSEQCIIVNNEDLFFIANKDSFSKDLAKAETIAYNTQNNTIENNFSIDQLILDNDLSSGIDLPNENTEPFTNFDDIDIPVYIKQSALKKIFVDGDSLFEYLHAQTFPSNIENLQLTNSLNDALRNNNKVYTFFSTNLVEKANTVVGASLFVNWVKGVIDDFTSESTQKSTIDKVSDVSIIIPYIGPALNVGNETAKENFKNAFEIGGAAILMEFIPELIVPIVGFFTLESYVGNKGHIIMTISNALKKRDQKWTDMYGLIVSQWLSTVNTQFYTIKERMYNALNNQSQAIEKIIEDQYNRYSEEDKMNINIDFNDIDFKLNQSINLAINNIDDFINQCSISYLMNRMIPLAVKKLKDFDDNLKRDLLEYIDTNELYLLDEVNILKSKVNRHLKDSIPFDLSLYTKDTILIQVFNNYISNISSNAILSLSYRGGRLIDSSGYGATMNVGSDVIFNDIGNGQFKLNNSENSNITAHQSKFVVYDSMFDNFSINFWVRTPKYNNNDIQTYLQNEYTIISCIKNDSGWKVSIKGNRIIWTLIDVNAKSKSIFFEYSIKDNISDYINKWFSITITNDRLGNANIYINGSLKKSEKILNLDRINSSNDIDFKLINCTDTTKFVWIKDFNIFGRELNATEVSSLYWIQSSTNTLKDFWGNPLRYDTQYYLFNQGMQNIYIKYFSKASMGETAPRTNFNNAAINYQNLYLGLRFIIKKASNSRNINNDNIVREGDYIYLNIDNISDESYRVYVLVNSKEIQTQLFLAPINDDPTFYDVLQIKKYYEKTTYNCQILCEKDTKTFGLFGIGKFVKDYGYVWDTYDNYFCISQWYLRRISENINKLRLGCNWQFIPVDEGWTE

SEQ ID NO: 134 - protein, 1315 aa, Clostridium tetani
MPITINNFRYSDPVNNDTIIMMEPPYCKGLDIYYKAFKITDRIWIVPERYEFGTKPEDFNPPSSLIEGASEYYDPNYLRTDSDKDRFLQTMVKLFNRIKNNVAGEALLDKIINAIPYLGNSYSLLDKFDTNSNSVSFNLLEQDPSGATTKSAMLTNLIIFGPGPVLNKNEVRGIVLRVDNKNYFPCRDGFGSIMQMAFCPEYVPTFDNVIENITSLTIGKSKYFQDPALLLMHELIHVLHGLYGMQVSSHEIIPSKQEIYMQHTYPISAEELFTFGGQDANLISIDIKNDLYEKTLNDYKAIANKLSQVTSCNDPNIDIDSYKQIYQQKYQFDKDSNGQYIVNEDKFQILYNSIMYGFTEIELGKKFNIKTRLSYFSMNHDPVKIPNLLDDTIYNDTEGFNIESKDLKSEYKGQNMRVNTNAFRNVDGSGLVSKLIGLCKKIIPPTNIRENLYNRTASLTDLGGELCIKIKNEDLTFIAEKNSFSEEPFQDEIVSYNTKNKPLNFNYSLDKIIVDYNLQSKITLPNDRTTPVTKGIPYAPEYKSNAASTIEIHNIDDNTIYQYLYAQKSPTTLQRITMTNSVDDALINSTKIYSYFPSVISKVNQGAQGILFLQWVRDIIDDFTNESSQKTTIDKISDVSTIVPYIGPALNIVKQGYEGNFIGALETTGVVLLLEYIPEITLPVIAALSIAESSTQKEKIIKTIDNFLEKRYEKWIEVYKLVKAKWLGTVNTQFQKRSYQMYRSLEYQVDAIKKIIDYEYKIYSGPDKEQIADEINNLKNKLEEKANKAMININIFMRESSRSFLVNQMINEAKKQLLEFDTQSKNILMQYIKANSKFIGITELKKLESKINKVFSTPIPFSYSKNLDCWVDNEEDIDVILKKSTILNLDINNDIISDISGFNSSVITYPDAQLVPGINGKAIHLVNNESSEVIVHKAMDIEYNDMFNNFTVSFWLRVPKVSASHLEQYGTNEYSIISSMKKHSLSIGSGWSVSLKGNNLIWTLKDSAGEVRQITFRDLPDKFNAYLANKWVFITITNDRLSSANLYINGVLMGSAEITGLGAIREDNNITLKLDRCNNNNQYVSIDKFRIFCKALNPKEIEKLYTSYLSITFLRDFWGNPLRYDTEYYLIPVASSSKDVQLKNITDYMYLTNAPSYTNGKLNIYYRRLYNGLKFIIKRYTPNNEIDSFVKSGDFIKLYVSYNNNEHIVGYPKDGNAFNNLDRILRVGYNAPGIPLYKKMEAVKLRDLKTYSVQLKLYDDKNASLGLVGTHNGQIGNDPNRDILIASNWYFNHLKDKILGCDWYFVPTDEGWTND

SEQ ID NO: 135 - protein, 1306 aa, Clostridium botulinum
MKLEINKFNYNDPIDGINVITMRPPRHSDKINKGKGPFKAFQVIKNIWIVPERYNFTNNTNDLNIPSEPIMEADAIYNPNYLNTPSEKDEFLQGVIKVLERIKSKPEGEKLLELISSSIPLPLVSNGALTLSDNETIAYQENNNIVSNLQANLVIYGPGPDIANNATYGLYSTPISNGEGTLSEVSFSPFYLKPFDESYGNYRSLVNIVNKFVKREFAPDPASTLMHELVHVTHNLYGISNRNFYYNFDTGKIETSRQQNSLIFEELLTFGGIDSKAISSLIIKKIIETAKNNYTTLISERLNTVTVENDLLKYIKNKIPVQGRLGNFKLDTAEFEKKLNTILFVLNESNLAQRFSILVRKHYLKERPIDPIYVNILDDNSYSTLEGFNISSQGSNDFQGQLLESSYFEKIESNALRAFIKICPRNGLLYNAIYRNSKNYLNNIDLEDKKTTSKTNVSYPCSLLNGCIEVENKDLFLISNKDSLNDINLSEEKIKPETTVFFKDKLPPQDITLSNYDFTEANSIPSISQQNILERNEELYEPIRNSLFEIKTIYVDKLTTFHFLEAQNIDESIDSSKIRVELTDSVDEALSNPNKVYSPFKNMSNTINSIETGITSTYIFYQWLRSIVKDFSDETGKIDVIDKSSDTLAIVPYIGPLLNIGNDIRHGDFVGAIELAGITALLEYVPEFTIPILVGLEVIGGELAREQVEAIVNNALDKRDQKWAEVYNITKAQWWGTIHLQINTRLAHTYKALSRQANAIKMNMEFQLANYKGNIDDKAKIKNAISETEILLNKSVEQAMKNTEKFMIKLSNSYLTKEMIPKVQDNLKNFDLETKKTLDKFIKEKEDILGTNLSSSLRRKVSIRLNKNIAFDINDIPFSEFDDLINQYKNEIEDYEVLNLGAEDGKIKDLSGTTSDINIGSDIELADGRENKAIKIKGSENSTIKIAMNKYLRFSATDNFSISFWIKHPKPTNLLNNGIEYTLVENFNQRGWKISIQDSKLIWYLRDHNNSIKIVTPDYIAFNGWNLITITNNRSKGSIVYVNGSKIEEKDISSIWNTEVDDPIIFRLKNNRDTQAFTLLDQFSIYRKELNQNEVVKLYNYYFNSNYIRDIWGNPLQYNKKYYLQTQDKPGKGLIREYWSSFGYDYVILSDSKTITFPNNIRYGALYNGSKVLIKNSKKLDGLVRNKDFIQLEIDGYNMGISADRFNEDTNYIGTTYGTTHDLTTDFEIIQRQEKYRNYCQLKTPYNIFHKSGLMSTETSKPTFHDYRDWVYSSAWYFQNYENLNLRKHTKTNWYFIPKDEGWDED

SEQ ID NO: 136 - DNA, 3891 bp, Artificial Sequence
  Modified BoNT/A1 (M1144V) Nucleic Acid Sequence
atgccgtttgtgaacaaacagttcaactataaagatccggtgaacggtgttgatatcgcctatatcaaaattccgaatgcaggtcagatgcagccggttaaagcctttaaaatccataacaaaatttgggtgattccggaacgtgatacctttaccaatccggaagaaggtgatctgaatccgcctccggaagcaaaacaggttccggttagctattatgatagcacctatctgagcaccgataacgagaaagataactatctgaaaggtgtgaccaaactgtttgaacgcatttatagtaccgatctgggtcgtatgctgctgaccagcattgttcgtggtattccgttttggggtggtagcaccattgataccgaactgaaagttattgacaccaactgcattaatgtgattcagccggatggtagctatcgtagcgaagaactgaatctggttattattggtccgagcgcagatatcattcagtttgaatgtaaatcctttggccacgaagttctgaatctgacccgtaatggttatggtagtacccagtatattcgtttcagtccggattttacctttggctttgaagaaagcctggaagttgatacaaatccgctgttaggtgcaggtaaatttgcaaccgatccggcagttaccctggcacatgaactgattcatgccggtcatcgtctgtatggtattgcaattaatccgaaccgtgtgttcaaagtgaataccaacgcatattatgaaatgagcggtctggaagtgtcatttgaagaactgcgtacctttggtggtcatgatgccaaatttatcgatagcctgcaagaaaatgaatttcgcctgtactactataacaaattcaaggatattgcgagcaccctgaataaagccaaaagcattgttggcaccaccgcaagcctgcagtatatgaaaaatgtgtttaaagaaaaatatctgctgagcgaagataccagcggtaaatttagcgttgacaaactgaaattcgataaactgtacaagatgctgaccgagatttataccgaagataacttcgtgaagtttttcaaagtgctgaaccgcaaaacctacctgaactttgataaagccgtgttcaaaatcaacatcgtgccgaaagtgaactataccatctatgatggttttaacctgcgcaataccaatctggcagcaaactttaatggtcagaacaccgaaatcaacaacatgaactttaccaaactgaagaacttcaccggtctgttcgaattttacaaactgctgtgtgttcgtggcattattacctccaaaaccaaaagcctggataaaggttataacaaagccctgaatgacctgtgcattaaagtgaataattgggacctgttttttagcccgagcgaagataactttaccaacgatctgaataaaggcgaagaaattaccagcgataccaatattgaagcagccgaagaaaacattagcctggatctgattcagcagtattatctgaccttcaactttgataacgagccggaaaatatcagcattgaaaatctgagcagcgatattattggtcagctggaactgatgccgaatattgaacgttttccgaacggcaaaaaatacgagctggataaatacaccatgttccattatctgcgtgcccaagaatttgaacatggtaaaagccgtattgccctgaccaattcagttaatgaagcactgctgaacccgagccgtgtttataccttttttagcagcgattacgtgaaaaaggtgaacaaagcaaccgaagcagcaatgtttttaggttgggttgaacagctggtgtatgatttcaccgatgaaaccagcgaagttagcaccaccgataaaattgcagatatcaccattatcatcccgtatattggtccggcactgaatattggcaatatgctgtataaagatgatttcgtgggtgccctgatttttagcggtgcagttattctgctggaatttattccggaaattgccattccggttctgggcacctttgcactggttagctatattgcaaataaagttctgaccgtgcagaccattgataatgcactgagcaaacgtaacgagaaatgggatgaagtgtacaaatatatcgtgaccaattggctggccaaagttaatacccagattgatctgatccgcaaaaaaatgaaagaagccctggaaaatcaggcagaagcaaccaaagccattatcaactatcagtataaccagtacaccgaagaagagaaaaacaacatcaacttcaacatcgatgacctgagcagcaaactgaatgaaagcatcaataaggccatgattaacatcaacaaatttctgaatcagtgcagcgtgagctatctgatgaatagcatgattccgtatggtgtgaaacgcctggaagattttgatgcaagcctgaaagatgcgctgctgaaatatatctatgataatcgtggcaccctgattggccaggttgatcgtctgaaagataaagttaacaataccctgagtaccgacattccgtttcagctgagcaaatatgttgataatcagcgtctgctgagcacctttaccgaatatatcaagaacatcatcaacaccagcattctgaatctgcgctatgaaagcaatcatctgatcgatctgagccgttatgcaagcaaaatcaacattggtagcaaagtgaacttcgacccgattgataaaaaccagattcagctgtttaatctggaaagcagcaaaatcgaagtgatcctgaaaaacgccattgtgtataacagcatgtatgagaatttctcgaccagcttttggattcgcattccgaaatactttaatagcatcagcctgaacaacgagtacaccattattaactgcatggaaaacaatagcggttggaaagtgagcctgaattatggtgaaattatctggaccctgcaggatacccaagaaatcaaacagcgtgttgtgttcaaatacagccagatgattaatatcagcgactatatcaaccgctggatctttgttaccattaccaataatcgcctgaataacagcaagatctatattaacggtcgcctgattgatcagaaaccgattagcaatctgggcaatattcatgcgagcaacaacattatgtttaaactggatggttgccgtgatacccatcgttatatttggatcaaatacttcaacctgtttgataaagaactgaacgaaaaagaaattaaagacctgtacgacaaccagagcaattccggtattctgaaagacttttggggagattatctgcagtatgacaaaccgtattatatgctgaacctgtatgacccgaacaaatatgtggatgtgaacaatgttggtatccgtggctatatgtatctgaaaggtccgcgtggtagcgttgtgaccaccaacatttatctgaatagcagcctgtatcgcggtacgaaatttatcattaaaaagtatgccagcggcaacaaggataatattgtgcgtaataatgatcgcgtgtacattaacgttgtggtgaagaataaagaatatcgcctggcaaccaatgcaagccaggcaggcgttgaaaaaattctgagcgcactggaaattccggatgttggtaatctgagccaggttgttgttatgaaaagcaaaaatgatcagggcatcaccaacaagtgcaaaatgaatctgcaggacaataacggcaacgatattggttttattggcttccaccagttcaacaatattgcgaaactggttgcaagcaattggtataatcgtcagattgaacgtagcagtcgtaccctgggttgtagctgggaatttatccctgtggatgatggttggggtgaacgtccgctgtaa

SEQ ID NO: 137 - DNA, 3891 bp, Artificial Sequence
  Modified BoNT/A1 (M1144G) Nucleic Acid Sequence
atgccgtttgtgaacaaacagttcaactataaagatccggtgaacggtgttgatatcgcctatatcaaaattccgaatgcaggtcagatgcagccggttaaagcctttaaaatccataacaaaatttgggtgattccggaacgtgatacctttaccaatccggaagaaggtgatctgaatccgcctccggaagcaaaacaggttccggttagctattatgatagcacctatctgagcaccgataacgagaaagataactatctgaaaggtgtgaccaaactgtttgaacgcatttatagtaccgatctgggtcgtatgctgctgaccagcattgttcgtggtattccgttttggggtggtagcaccattgataccgaactgaaagttattgacaccaactgcattaatgtgattcagccggatggtagctatcgtagcgaagaactgaatctggttattattggtccgagcgcagatatcattcagtttgaatgtaaatcctttggccacgaagttctgaatctgacccgtaatggttatggtagtacccagtatattcgtttcagtccggattttacctttggctttgaagaaagcctggaagttgatacaaatccgctgttaggtgcaggtaaatttgcaaccgatccggcagttaccctggcacatgaactgattcatgccggtcatcgtctgtatggtattgcaattaatccgaaccgtgtgttcaaagtgaataccaacgcatattatgaaatgagcggtctggaagtgtcatttgaagaactgcgtacctttggtggtcatgatgccaaatttatcgatagcctgcaagaaaatgaatttcgcctgtactactataacaaattcaaggatattgcgagcaccctgaataaagccaaaagcattgttggcaccaccgcaagcctgcagtatatgaaaaatgtgtttaaagaaaaatatctgctgagcgaagataccagcggtaaatttagcgttgacaaactgaaattcgataaactgtacaagatgctgaccgagatttataccgaagataacttcgtgaagtttttcaaagtgctgaaccgcaaaacctacctgaactttgataaagccgtgttcaaaatcaacatcgtgccgaaagtgaactataccatctatgatggttttaacctgcgcaataccaatctggcagcaaactttaatggtcagaacaccgaaatcaacaacatgaactttaccaaactgaagaacttcaccggtctgttcgaattttacaaactgctgtgtgttcgtggcattattacctccaaaaccaaaagcctggataaaggttataacaaagccctgaatgacctgtgcattaaagtgaataattgggacctgttttttagcccgagcgaagataactttaccaacgatctgaataaaggcgaagaaattaccagcgataccaatattgaagcagccgaagaaaacattagcctggatctgattcagcagtattatctgaccttcaactttgataacgagccggaaaatatcagcattgaaaatctgagcagcgatattattggtcagctggaactgatgccgaatattgaacgttttccgaacggcaaaaaatacgagctggataaatacaccatgttccattatctgcgtgcccaagaatttgaacatggtaaaagccgtattgccctgaccaattcagttaatgaagcactgctgaacccgagccgtgtttataccttttttagcagcgattacgtgaaaaaggtgaacaaagcaaccgaagcagcaatgtttttaggttgggttgaacagctggtgtatgatttcaccgatgaaaccagcgaagttagcaccaccgataaaattgcagatatcaccattatcatcccgtatattggtccggcactgaatattggcaatatgctgtataaagatgatttcgtgggtgccctgatttttagcggtgcagttattctgctggaatttattccggaaattgccattccggttctgggcacctttgcactggttagctatattgcaaataaagttctgaccgtgcagaccattgataatgcactgagcaaacgtaacgagaaatgggatgaagtgtacaaatatatcgtgaccaattggctggccaaagttaatacccagattgatctgatccgcaaaaaaatgaaagaagccctggaaaatcaggcagaagcaaccaaagccattatcaactatcagtataaccagtacaccgaagaagagaaaaacaacatcaacttcaacatcgatgacctgagcagcaaactgaatgaaagcatcaataaggccatgattaacatcaacaaatttctgaatcagtgcagcgtgagctatctgatgaatagcatgattccgtatggtgtgaaacgcctggaagattttgatgcaagcctgaaagatgcgctgctgaaatatatctatgataatcgtggcaccctgattggccaggttgatcgtctgaaagataaagttaacaataccctgagtaccgacattccgtttcagctgagcaaatatgttgataatcagcgtctgctgagcacctttaccgaatatatcaagaacatcatcaacaccagcattctgaatctgcgctatgaaagcaatcatctgatcgatctgagccgttatgcaagcaaaatcaacattggtagcaaagtgaacttcgacccgattgataaaaaccagattcagctgtttaatctggaaagcagcaaaatcgaagtgatcctgaaaaacgccattgtgtataacagcatgtatgagaatttctcgaccagcttttggattcgcattccgaaatactttaatagcatcagcctgaacaacgagtacaccattattaactgcatggaaaacaatagcggttggaaagtgagcctgaattatggtgaaattatctggaccctgcaggatacccaagaaatcaaacagcgtgttgtgttcaaatacagccagatgattaatatcagcgactatatcaaccgctggatctttgttaccattaccaataatcgcctgaataacagcaagatctatattaacggtcgcctgattgatcagaaaccgattagcaatctgggcaatattcatgcgagcaacaacattatgtttaaactggatggttgccgtgatacccatcgttatatttggatcaaatacttcaacctgtttgataaagaactgaacgaaaaagaaattaaagacctgtacgacaaccagagcaattccggtattctgaaagacttttggggagattatctgcagtatgacaaaccgtattatatgctgaacctgtatgacccgaacaaatatgtggatgtgaacaatgttggtatccgtggctatatgtatctgaaaggtccgcgtggtagcgttggtaccaccaacatttatctgaatagcagcctgtatcgcggtacgaaatttatcattaaaaagtatgccagcggcaacaaggataatattgtgcgtaataatgatcgcgtgtacattaacgttgtggtgaagaataaagaatatcgcctggcaaccaatgcaagccaggcaggcgttgaaaaaattctgagcgcactggaaattccggatgttggtaatctgagccaggttgttgttatgaaaagcaaaaatgatcagggcatcaccaacaagtgcaaaatgaatctgcaggacaataacggcaacgatattggttttattggcttccaccagttcaacaatattgcgaaactggttgcaagcaattggtataatcgtcagattgaacgtagcagtcgtaccctgggttgtagctgggaatttatccctgtggatgatggttggggtgaacgtccgctgtaa

SEQ ID NO: 138 - DNA, 3891 bp, Artificial Sequence
  Modified BoNT/A1 (M1144L) Nucleic Acid Sequence
atgccgtttgtgaacaaacagttcaactataaagatccggtgaacggtgttgatatcgcctatatcaaaattccgaatgcaggtcagatgcagccggttaaagcctttaaaatccataacaaaatttgggtgattccggaacgtgatacctttaccaatccggaagaaggtgatctgaatccgcctccggaagcaaaacaggttccggttagctattatgatagcacctatctgagcaccgataacgagaaagataactatctgaaaggtgtgaccaaactgtttgaacgcatttatagtaccgatctgggtcgtatgctgctgaccagcattgttcgtggtattccgttttggggtggtagcaccattgataccgaactgaaagttattgacaccaactgcattaatgtgattcagccggatggtagctatcgtagcgaagaactgaatctggttattattggtccgagcgcagatatcattcagtttgaatgtaaatcctttggccacgaagttctgaatctgacccgtaatggttatggtagtacccagtatattcgtttcagtccggattttacctttggctttgaagaaagcctggaagttgatacaaatccgctgttaggtgcaggtaaatttgcaaccgatccggcagttaccctggcacatgaactgattcatgccggtcatcgtctgtatggtattgcaattaatccgaaccgtgtgttcaaagtgaataccaacgcatattatgaaatgagcggtctggaagtgtcatttgaagaactgcgtacctttggtggtcatgatgccaaatttatcgatagcctgcaagaaaatgaatttcgcctgtactactataacaaattcaaggatattgcgagcaccctgaataaagccaaaagcattgttggcaccaccgcaagcctgcagtatatgaaaaatgtgtttaaagaaaaatatctgctgagcgaagataccagcggtaaatttagcgttgacaaactgaaattcgataaactgtacaagatgctgaccgagatttataccgaagataacttcgtgaagtttttcaaagtgctgaaccgcaaaacctacctgaactttgataaagccgtgttcaaaatcaacatcgtgccgaaagtgaactataccatctatgatggttttaacctgcgcaataccaatctggcagcaaactttaatggtcagaacaccgaaatcaacaacatgaactttaccaaactgaagaacttcaccggtctgttcgaattttacaaactgctgtgtgttcgtggcattattacctccaaaaccaaaagcctggataaaggttataacaaagccctgaatgacctgtgcattaaagtgaataattgggacctgttttttagcccgagcgaagataactttaccaacgatctgaataaaggcgaagaaattaccagcgataccaatattgaagcagccgaagaaaacattagcctggatctgattcagcagtattatctgaccttcaactttgataacgagccggaaaatatcagcattgaaaatctgagcagcgatattattggtcagctggaactgatgccgaatattgaacgttttccgaacggcaaaaaatacgagctggataaatacaccatgttccattatctgcgtgcccaagaatttgaacatggtaaaagccgtattgccctgaccaattcagttaatgaagcactgctgaacccgagccgtgtttataccttttttagcagcgattacgtgaaaaaggtgaacaaagcaaccgaagcagcaatgtttttaggttgggttgaacagctggtgtatgatttcaccgatgaaaccagcgaagttagcaccaccgataaaattgcagatatcaccattatcatcccgtatattggtccggcactgaatattggcaatatgctgtataaagatgatttcgtgggtgccctgatttttagcggtgcagttattctgctggaatttattccggaaattgccattccggttctgggcacctttgcactggttagctatattgcaaataaagttctgaccgtgcagaccattgataatgcactgagcaaacgtaacgagaaatgggatgaagtgtacaaatatatcgtgaccaattggctggccaaagttaatacccagattgatctgatccgcaaaaaaatgaaagaagccctggaaaatcaggcagaagcaaccaaagccattatcaactatcagtataaccagtacaccgaagaagagaaaaacaacatcaacttcaacatcgatgacctgagcagcaaactgaatgaaagcatcaataaggccatgattaacatcaacaaatttctgaatcagtgcagcgtgagctatctgatgaatagcatgattccgtatggtgtgaaacgcctggaagattttgatgcaagcctgaaagatgcgctgctgaaatatatctatgataatcgtggcaccctgattggccaggttgatcgtctgaaagataaagttaacaataccctgagtaccgacattccgtttcagctgagcaaatatgttgataatcagcgtctgctgagcacctttaccgaatatatcaagaacatcatcaacaccagcattctgaatctgcgctatgaaagcaatcatctgatcgatctgagccgttatgcaagcaaaatcaacattggtagcaaagtgaacttcgacccgattgataaaaaccagattcagctgtttaatctggaaagcagcaaaatcgaagtgatcctgaaaaacgccattgtgtataacagcatgtatgagaatttctcgaccagcttttggattcgcattccgaaatactttaatagcatcagcctgaacaacgagtacaccattattaactgcatggaaaacaatagcggttggaaagtgagcctgaattatggtgaaattatctggaccctgcaggatacccaagaaatcaaacagcgtgttgtgttcaaatacagccagatgattaatatcagcgactatatcaaccgctggatctttgttaccattaccaataatcgcctgaataacagcaagatctatattaacggtcgcctgattgatcagaaaccgattagcaatctgggcaatattcatgcgagcaacaacattatgtttaaactggatggttgccgtgatacccatcgttatatttggatcaaatacttcaacctgtttgataaagaactgaacgaaaaagaaattaaagacctgtacgacaaccagagcaattccggtattctgaaagacttttggggagattatctgcagtatgacaaaccgtattatatgctgaacctgtatgacccgaacaaatatgtggatgtgaacaatgttggtatccgtggctatatgtatctgaaaggtccgcgtggtagcgttctgaccaccaacatttatctgaatagcagcctgtatcgcggtacgaaatttatcattaaaaagtatgccagcggcaacaaggataatattgtgcgtaataatgatcgcgtgtacattaacgttgtggtgaagaataaagaatatcgcctggcaaccaatgcaagccaggcaggcgttgaaaaaattctgagcgcactggaaattccggatgttggtaatctgagccaggttgttgttatgaaaagcaaaaatgatcagggcatcaccaacaagtgcaaaatgaatctgcaggacaataacggcaacgatattggttttattggcttccaccagttcaacaatattgcgaaactggttgcaagcaattggtataatcgtcagattgaacgtagcagtcgtaccctgggttgtagctgggaatttatccctgtggatgatggttggggtgaacgtccgctgtaa

SEQ ID NO: 139 - protein, 1297 aa, Clostridium botulinum
MPFVNKQFNYKDPVNGVDIAYIKIPNAGQMQPVKAFKIHNKIWVIPERDTFTNPEEGDLNPPPEAKQVPVSYYDSTYLSTDNEKDNYLKGVTKLFERIYSTDLGRMLLTSIVRGIPFWGGSTIDTELKVIDTNCINVIQPDGSYRSEELNLVIIGPSADIIQFECKSFGHDVLNLTRNGYGSTQYIRFSPDFTFGFEESLEVDTNPLLGAGKFATDPAVTLAHELIHAEHRLYGIAINPNRVFKVNTNAYYEMSGLEVSFEELRTFGGHDAKFIDSLQENEFRLYYYNKFKDVASTLNKAKSIIGTTASLQYMKNVFKEKYLLSEDTSGKFSVDKLKFDKLYKMLTEIYTEDNFVNFFKVINRKTYLNFDKAVFRINIVPDENYTIKDGFNLKGANLSTNFNGQNTEINSRNFTRLKNFTGLFEFYKLLCVRGIIPFKTKSLDEGYNKALNDLCIKVNNWDLFFSPSEDNFTNDLDKVEEITADTNIEAAEENISLDLIQQYYLTFDFDNEPENISIENLSSDIIGQLEPMPNIERFPNGKKYELDKYTMFHYLRAQEFEHGDSRIILTNSAEEALLKPNVAYTFFSSKYVKKINKAVEAFMFLNWAEELVYDFTDETNEVTTMDKIADITIIVPYIGPALNIGNMLSKGEFVEAIIFTGVVAMLEFIPEYALPVFGTFAIVSYIANKVLTVQTINNALSKRNEKWDEVYKYTVTNWLAKVNTQIDLIREKMKKALENQAEATKAIINYQYNQYTEEEKNNINFNIDDLSSKLNESINSAMININKFLDQCSVSYLMNSMIPYAVKRLKDFDASVRDVLLKYIYDNRGTLILQVDRLKAEVNNTLSTDIPFQLSKYVENKKLLSTFTEYIKNITNTSILSIVVDKDDELIDLSRYGAEIYRGDKVFYNSIDKNQIKLINLESSTIEVILKNAIVYNSMYENFSTSFWIKIPKYFSKINLNNEYTIINCIENNSGWKVSLNYGEIIWTLQDNKQNIQRVVFKYSQMVNISDYINRWIFVTITNNRLTKSKIYINGRLIDQKLISNLGNIHASNKIMFKLDGCRDPGRYIVIKYFNLFDKELNEKEIKDLYDSQSNSGILKDFWGDYLQYDKPYYMLNLYDPNKYVDVNNIGIRGYMYLKGPRGSVVTTNIYLNSTLYMGTKFIIKKYASGNEDNIVRNNDRVYINVVVKNKEYRLATNASQAGVEKILSALEIPDVGNLSQLVVMKSKDDQGIRNKCKMNLQDNNGNDIGLIGFHQFNNIAKLVASNWYNRQVGKASRTFGCSWEFIPVDDGWGESSQ

SEQ ID NO: 140 - protein, 1296 aa, Clostridium botulinum
MPFVNKQFNYKDPVNGVDIAYIKIPNAGQMQPVKAFKIHNKIWVIPERDTFTNPEEGDLNPPPEAKQVPVSYYDSTYLSTDNEKDNYLKGVTKLFERIYSTELGRMLLTSIVRGIPFWGGSTIDTELKVIDTNCINVIQPDGSYRSEELNLVIIGPSADIIQFECKSFGHDVLNLTRNGYGSTQYIRFSPDFTFGFEESLEVDTNPLLGAGKFATDPAVTLAHELIHAGHRLYGIAINPNRVFKVNTNAYYEMSGLEVSFEELRTFGEHDAKFIDSLQENEFRLYYYNKFKDIASTLNKAKSIVGTTASLQYMKNVFKEKYLLSEDTSGKFSVDKLKFDKLYKMLTEIYTEDNFVKFFKVLNRKTYLNFDKAVFKINIVPEVNYTIYDGFNLRNTNLAANFNGQNTEINNMNFTKLKNFTGLFEFYKLLCVRGIITSKTKSLDEGYNKALNDLCIKVNNWDLFFSPSEDNFTNDLNKGEEITSDTNIEAAEENISLDLIQQYYLTFNFDNEPENISIENLSSDIIGQLELMPNIERFPNGKKYELDKYTMFHYLRAQEFEHGKSRIVLTNSVNEALLNPSSVYTFFSSDYVRKVNKATEAAMFLGWVEQLVYDFTDETSEVSTTDKIADITIIIPYIGPALNIGNMLYKDDFVGALIFSGAVILLEFIPEIAIPVLGTFALVSYIANKVLTVQTIDNALSKRNEKWGEVYKYIVTNWLAKVNTQIDLIRKKMKEALENQAEATKAIINYQYNQYTEEEKNNINFNIGDLSSKLNDSINKAMININKFLNQCSVSYLMNSMIPYGVKRLEDFDASLKDALLKYIYDNRGTLIGQVDRLKDKVNNTLSTDIPFQLSKYVDNQRLLSTFTEYIKNIINTSILNLRYESNHLIDLSRYASEINIGSKVNFDPIDKNQIQLFNLESSKIEIILKNAIVYNSMYENFSTSFWIKIPKYFSKINLNNEYTIINCIENNSGWKVSLNYGEIIWTLQDNKQNIQRVVFKYSQMVAISDYINRWIFITITNNRLNNSKIYINGRLIDQKPISNLGNIHASNNIMFKLDGCRDPQRYIWIKYFNLFDKELNEKEIKDLYDNQSNSGILKDFWGNYLQYDKPYYMLNLYDPNKYVDVNNVGIRGYMYLKGPRGSIVTTNIYLNSSLYMGTKFIIKKYASGNKDNIVRNNDRVYINVVVKNKEYRLATNASQAGVEKILSVLEIPDVGNLSQVVVMKSKNDQGIRNKCKMNLQDNNGNDIGFIGFHQFNNIDKLVASNWYNRQIERSSRTFGCSWEFIPVDDGWGESPL

SEQ ID NO: 141 - protein, 1296 aa, Clostridium botulinum
MLFVNKQFNYKDPVNGVDIAYIKIPNAGQMQPVKAFKIHNKIWVIPERDTFTNPEEGDLNPPPEAKQVPVSYYDSTYLSTDNEKDNYLKGVTKLFERIYSTELGRMLLTSIVRGIPFWGGSTIDTELKVIDTNCINVIQPDGSYRSEELNLVIIGPSADIIQFECKSFGHDVLNLTRNGYGSTQYIRFSPDFTFGFEESLEVDTNPLLGAGKFATDPAVTLAHELIHAGHRLYGIAINPNRVFKVNTNAYYEMSGLEVSFEELRTFGEHDAKFIDSLQENEFRLYYYNKFKDIASTLNKAKSIVGTTASLQYMKNVFKEKYLLSEDTSGKFSVDKLKFDKLYKMLTEIYTEDNFVKFFKVLNRKTYLNFDKAVFKINIVPEVNYTIYDGFNLRNTNLAANFNGQNTEINNMNFTKLKNFTGLFEFYKLLCVRGIITSKTKSLDEGYNKALNDLCIKVNNWDLFFSPSEDNFTNDLNKGEEITSDTNIEAAEENISLDLIQQYYLTFNFDNEPENISIENLSSDIIGQLELMPNIERFPNGKKYELDKYTMFHYLRAQEFEHGKSRIVLTNSVNEALLNPSSVYTFFSSDYVRKVNKATEAAMFLGWVEQLVYDFTDETSEVSTTDKIADITIIIPYIGPALNIGNMLYKDDFVGALIFSGAVILLEFIPEIAIPVLGTFALVSYIANKVLTVQTIDNALSKRNEKWGEVYKYIVTNWLAKVNTQIDLIRKKMKEALENQAEATKAIINYQYNQYTEEEKNNINFNIGDLSSKLNDSINKAMININKFLNQCSVSYLMNSMIPYGVKRLEDFDASLKDALLKYIYDNRGTLIGQVDRLKDKVNNTLSTDIPFQLSKYVDNQRLLSTFTEYIKNIINTSILNLRYESNHLIDLSRYASEINIGSKVNFDPIDKNQIQLFNLESSKIEIILKNAIVYNSMYENFSTSFWIKIPKYFSKINLNNEYTIINCIENNSGWKVSLNYGEIIWTLQDNKQNIQRVVFKYSQMVAISDYINRWIFITITNNRLNNSKIYINGRLIDQKPISNLGNIHASNNIMFKLDGCRDPHRYIWIKYFNLFDKELNEKEIKDLYDNQSNSGILKDFWGNYLQYDKPYYMLNLYDPNKYVDVNNVGIRGYMYLKGPRGSIVTTNIYLNSSLYMGTKFIIKKYASGNKDNIVRNNDRVYINVVVKNKEYRLATNASQAGVEKILSVLEIPDVGNLSQVVVMKSKNDQGIRNKCKMNLQDNNGNDIGFIGFHQFNNIDKLVASNWYNRQIERSSRTFGCSWEFIPVDDGWGESPL

SEQ ID NO: 142 - protein, 1296 aa, Clostridium botulinum
MPFVNKQFNYKDPVNGVDIAYIKIPNAGQMQPVKAFKIHNKIWVIPERDTFTNPEEGDLNPPPEAKQVPVSYYDSTYLSTDNEKDNYLKGVTKLFERIYSTDLGRMLLTSIVRGIPFWGGSTIDTELKVIDTNCINVIQPDGSYRSEELNLVIIGPSADIIQFECKSFGHEVLNLTRNGYGSTQYIRFSPDFTFGFEESLEVDTNPLLGAGKFATDPAVTLAHELIHAGHRLYGIAINPNRVFKVNTNAYYEMSGLEVSFEELRTFGGHDAKFIDSLQENEFRLYYYNKFKDIASTLNKAKSIVGTTASLQYMKNVFKEKYLLSEDTSGKFSVDKLKFDKLYKMLTEIYTEDNFVKFFKVLNRKTYLNFDKAVFKINIVPKVNYTIYDGFNLRNTNLAANFNGQNTEINNMNFAKLKNFTGLFEFYKLLCVRGIITSKTKSLDKGYNKALNDLCIKVNNWDLFFSPSEDNFTNDLNKGEEITSDTNIEAAEENISLDLIQQYYLTFNFDNEPENISIENLSSDIIGQLELMPNIERFPNGKKYELDKYTMFHYLSAQEFEHGKSRIDLTNSVNEALLNPSHVYTFFSSDYVKKVNKATEAAMFLGWVEQLVYDFTDETSEVSTTDKIADITIIIPYIGPALNIGNMLYKDDFVGALIFSGAVILLEFIPEIAIPVLGTFAIVSYIANKVLTVQTINNALSKRNEKWDEVYKYTVTNWLAKVNTQIDLIREKMKKALENQAEATKAIINYQYNQYTEEEKNNINFNIDDLSSKLNESINSAMININKFLDQCSVSYLMNSMIPYAVKRLKDFDASVRDVLLKYIYDNRGTLIGQVDRLKDKVNNTLSTDIPFQLSKYVDNQRLLSTFTEYIKNIINTSILSLRYENNHLIDLSRYASKINIGSRVNFDPIDKNQIQLFNLESSKIEVILKNAIVYNSMYENFSTSFWIKIPKYFSEISLNNEYTIINCIENNSGWKVSLNYGEIIWTLQDNKQNIQRVVFKYSQMVAISDYINRWIFITITNNRLTKSKIYINGRLIDQKPISNLGNIHASNKIMFKLDGCRDPRRYIMIKYFNLFDKELNEKEIKDLYDSQSNSGILKDFWGNYLQYDKPYYMLNLFDPNKYVDVNNVGIRGYMYLKGSRSTLLTTNIYLNSGLYMGTKFIIKKYASGNKDNIVRNNDRVYINVVVNNKEYRLATNASQAGVEKILSALEIPDIGNLSQVVVMKSKNDQGIRNKCKMNLQDNNGNDIGFIGFHKFNDIYKLVASNWYNRQIEISSRTFGCSWEFIPVDDGWGEKPL

SEQ ID NO: 143 - protein, 1296 aa, Clostridium botulinum
MPFVNKQFNYKDPVNGVDIAYIKIPNAGQMQPVKAFKIHNKIWVIPERDIFTNPEEGDLNPPPEAKQVPVSYYDSTYLSTDNEKDNYLKGVTKLFERIYSTDLGRMLLTSIVRGIPFWGGSTIDTELKVIDTNCINVIQPDGSYRSEELNLVIIGPSADIINFECKSFGHDVLNLTRNGYGSTQYIRFSPDFTFGFEESLEVDTNPLLGAGKFAIDPAVTLAHELIHAGHRLYGIAINPNRVFKVNTNAYYEMSGLEVSFEELRTFGGHDAKFIDSLQENEFRLYYYNKFKEVASILNKAKSIIGTTASLQYMKNVFKEKYLLSEDTSGKFSVDKLRFDKLYKMLTEIYTEDNFVKFFKVLNRKTYLNFDKAVFKMNIVPEVNYTIYDGFNLRNTNLAANFNGQNTEINNMNFTKLKNFTGLFEFYKLLCVRGIITSKTKSLDEGYNKALNDLCIKVNNWDLFFSPSEDNFTNDLNKGEEITSDTNIEAAEENISSDLIQQYYLTFNFDNEPENISIENLSSDIIGQLELMPNIERFPNGKKYELDKYTMFHYLRAQEFEYGNSRIVLINSVNEALLNPSSVYTFFSSDYVKKANEATEAAMFLGWVEQLVYDFTDETSEVSTMDKIADITIIVPYIGPALNIGNMVYKKKFEEALIFSGAVILLEFVPEIVLPILGTFALVSYTSNKVLTVRTIDNALSKRNEKWEEVYKYIVTNWLAKVNTQINLIRKKMKEALENQAEATKAIINYQYNQYTEEEKNNINFNIGDLSSKLNDSINKAMININKFLDQCSVSYLMNSMIPQGVKQLKDFDTSLRDSLLKYIYDNRGTLIGQVDRLKDKVNNTLSTDIPFQLSKYADNQRLLSTFTEYIKNIINTSILNLRYESNHLIDLSRYASKINIGSRVNFDPIDKNQIQLFNLESSKIEVILKNAIVYNSMYENFSTSFWIKIPKYFSKINLNNEYTIINCIENNSGWKVSLNYGEIIWTLQDNEQNIQRVVFKYSQMVNISDYINRWIFVTITNNRLTKSKIYINGRLIDQKPISNLGNIHASNKIMFKLDGCRDPHRYILIKYFNLFDKELNEKEIKDLYDNQSNSGILKDFWGDYLQYDKPYYMLNLYDPNKYIDVNNIGIRGYMYLKGPRGSVTTTNIYLNSMLYMGTKFIIKKHASGNKDNIVRNNDRVYINVLVKNKEYRLATNASQAGGEKILSAVEIPDVGNLSQVVVMKSKNDQGIRNKCKMNLQDNNGNDIGFIGFHQFNNIAKLVASNWYNRQIGKTSVTLGCSWELIPVDYGWGESSL

SEQ ID NO: 144 - protein, 1297 aa, Clostridium botulinum
MPFVNKQFNYKDTVNGIDIAYIKIPNAGQMQPVKAFKIHNKIWVIPERDTFTNPKEGDLNPPPEAKQVPVSYYDSTYLSTDNEKDNYLKGVTKLFERIYSTDLGRMLLTSIVRGIPFWGGSTIDTELKVIDTNCINVIQPDGSYRSEELNLVIIGPSADIIQFECKSFGHDVLNLTRNGYGSTQYIRFSPDFTFGFEESLEVDTNPLLGAGKFATDPAVTLAHELIHAEHRLYGIAINPNRVFKVNTNAYYEMSGLEVSFEELRTFGGHNAKFIDSLQENEFRLYYYNKFKDIASTLNKAKSIVGTTASLQYMKNVFKEKYLLSEDTSGKFSVDKLKFDKLYKMLTEIYTEDNFVKFFKVLNRKTYLNFDKAVFKINIVPDENYTIKDGFNLKNTNLAANFNGQNTEINSRNFTKLKNFTGLFEFYKLLCVRGIIPFKTKSLDEGYNKALNDLCIKVNNWDLFFSPSEDNFTNDLDKVEEITSDTNIEAAEENISLDLIQQYYLTFDFDNEPENISIENLSSDIIGQLEPMPNIERFPNGKKYELDKYTMFHYLRAQEFEHSKSRIALTNSVNEALLNPSRVYTFFSSDYVKKVNKATEAAMFLGWVEQLVYDFTDETSEVSTTDKIADITIIIPYIGPALNIGNMLYKDDFVGALIFSGAVILLEFIPEIAIPVLGTFALVSYIANKVLTVQTIDNALSKRNEKWDEVYKYIVTNWLAKVNTQIDLVRKKMKEALENQAEATKAIINYQYNQYTEEEKNNINFNIDDLSSKLNESINSAMTNINKFLDQCSVSYLMNSMIPYAVKRLKDFDASVREVLLKYIYDNRGTLILQVDRLKDKVNNTLSADIPFQLSKYVDNKKLLSTFTEYIKNITNTSILSIVVDKDGRLIDLSRYGAEIYNGDKVSYNSIDKNQIKLINLESSAIEVILKNAIVYNSMYENFSTSFWIKIPKYFSKINLNNEYTIINCIENNSGWKVSLNYGEIIWTLQDNQQNIQRVVFKYSQMVNISDYINRWIFVTITNNRLDKSKIYINGRLIDQKPISNLGNIHASNNIMFKLDGCRDPRRYIVIKYFNLFDKELNEKEIKDLYDNQSNSGILKDFWGDYLQYDKPYYMLNLYDPNKYVDVNNIGIRGYMYLKGPRGSVVTTNIYLNSTLYMGTKFIIKKYASGNKDNIVRNNDRVYINVVVKNKEYRLATNALQAGVEKILSALEIPDVGNLSQVVVMKSKNDQGIRNKCKMNLQDNNGNDIGLIGFHQFNNIAKLVASNWYNRQVGKASRTFGCSWEFIPVDDGWGESSQ

1. A modified clostridial neurotoxin comprising a botulinum neurotoxin A (BoNT/A) heavy chain C-terminal (H_{cc}) domain, wherein the H_{cc} domain comprises an amino acid modification at the methionine at a position corresponding to position 1144 of SEQ ID NO: 2 (M1144), wherein the amino acid modification results in increased oxidative resistance of the modified clostridial neurotoxin as compared to an otherwise identical clostridial neurotoxin lacking the modification.

2. A method for producing a modified clostridial neurotoxin, the method comprising expressing a nucleic acid encoding the modified clostridial neurotoxin of claim 1 in a suitable host cell, thereby producing the modified clostridial neurotoxin.

3. (canceled)

4. The modified clostridial neurotoxin of claim 1, wherein the modification is a substitution of M1144 with an amino acid resistant to oxidation.

5. The modified clostridial neurotoxin of claim 1, wherein the modified H_{cc} domain comprises the amino acid sequence of RX₁×₂VX₃TTNIYLNSX₄LYX₅GT (SEQ ID NO: 102), wherein:
X₁ is D or G;
X₂ is S or N;
X₃ is an amino acid that is resistant to oxidation;
X₄ is S or T;
and X₅ is M or R.

6. (canceled)

7. The modified clostridial neurotoxin of claim 1, wherein M1144 is substituted with valine, glycine, leucine, threonine, or isoleucine.

8. The modified clostridial neurotoxin of claim 1, wherein the modification is a deletion of M1144.

9. The modified clostridial neurotoxin of claim 1, wherein the modified H_{cc} domain comprises the amino acid sequence of RX₁×₂VTTNIYLNSX₃LYX₄GT (SEQ ID NO: 111), wherein:
X₁ is D or G;
X₂ is S or N;
X₃ is S or T; and
X₄ is M or R.

10. (canceled)

11. The modified clostridial neurotoxin of claim 1, wherein the BoNT/A H_{cc} domain is a BoNT/A1 H_{cc} domain, a BoNT/A3 H_{cc} domain, or a BoNT/A4 H_{cc} domain.

12-13. (canceled)

14. The modified clostridial neurotoxin of claim 1, comprising an amino acid sequence having at least 90% sequence identity to any one of SEQ ID NOs: 63-69, 71-77, 79-85, 87-93, and 95-101.

15. The modified clostridial neurotoxin of claim 1, wherein the modified clostridial neurotoxin is a modified BoNT/A1, a modified BoNT/A3, or a modified BoNT/A4.

16. The modified clostridial neurotoxin of claim 1, wherein the modified clostridial neurotoxin is a modified BoNT/A1 further comprising modification of one or more of:
the asparagine at position 886, 905, 918, 930, 954, 1006, 1025, 1026, 1032, 1043, 1046, 1052, 1080, 1188, 1216, 1242, or 1243;
the glutamine at position 915, 991, 995, or 1229;
the glutamic acid at position 920, 992, 1081, or 1083;
the serine at position 995 or 1274;
the aspartic acid at position 1058, 1086, or 1213;
the histidine at position 1064; the glycine at position 1215; or
the threonine at position 1277;
wherein the residue positions correspond to positions in SEQ ID NO: 2.

17. (canceled)

18. The modified clostridial neurotoxin of claim 1, comprising an amino acid sequence having at least 90% sequence identity to any one of SEQ ID NOs: 3-9, 12-18, 21-27, 30-36, 39-45, 47-53, and 55-61.

19. The modified clostridial neurotoxin of claim 1, wherein the modified clostridial neurotoxin is a single-chain modified clostridial neurotoxin.

20. The modified clostridial neurotoxin of claim 1, wherein the modified clostridial neurotoxin is a di-chain modified clostridial neurotoxin comprising a light chain and a heavy chain joined together by a disulphide bond.

21-25. (canceled)

26. A nucleic acid encoding the modified clostridial neurotoxin of claim 1.

27. (canceled)

28. A method of activating a modified clostridial neurotoxin, the method comprising contacting the single-chain modified clostridial neurotoxin of claim 19 with a protease that cleaves the single-chain modified clostridial neurotoxin at a cleavage site located between the light chain and heavy chain, thereby converting the single-chain modified clostridial neurotoxin into a di-chain modified clostridial neurotoxin, wherein the light chain and heavy chain are joined together by a disulphide bond.

29. A di-chain modified clostridial neurotoxin obtainable by the method of claim 28.

30. A pharmaceutical composition comprising the modified clostridial neurotoxin of claim 1 and a pharmaceutically acceptable carrier, excipient, adjuvant, propellant and/or salt.

31-32. (canceled)

33. A method of treating a disorder, the method comprising administering the modified clostridial neurotoxin of claim 1 to a subject, wherein the disorder is selected from: a condition associated with unwanted immune secretion, strabismus, blepharospasm, squint, dystonia, torticollis, a neuromuscular disorder or condition of ocular motility, a cosmetic disorder, writer's cramp, bruxism, Wilson's disease, tremor, tics, segmental myoclonus, spasms, spasticity due to chronic multiple sclerosis, spasticity resulting in abnormal bladder control, animus, back spasm, charley horse, tension headaches, levator pelvic syndrome, spina bifida, tardive dyskinesia, Parkinson's disease, stuttering, hemifacial spasm, eyelid disorder, cerebral palsy, focal spasticity, spasmodic colitis, neurogenic bladder, anismus, limb spasticity, anal fissure, achalasia, dysphagia, lacrimation, hyperhydrosis, excessive salivation, excessive gastrointestinal secretions, muscle pain, headache pain, cancer, uterine disorders, uro-genital disorders, urogenital-neurological disorders, chronic neurogenic inflammation, and a smooth muscle disorder.

34. (canceled)

35. A method of cosmetic treatment, the method comprising administering the modified clostridial neurotoxin of claim 1, to a subject.

36-37. (canceled)
